(19) United States
(12) Patent Application Publication
(10) Pub. No.: US 2018/0002736 A1
(43) Pub. Date: Jan. 4, 2018

(54) METHODS AND COMPOSITIONS FOR LABELING A SINGLE-STRANDED TARGET NUCLEIC ACID

(71) Applicant: The Regents of the University of California, Oakland, CA (US)

(72) Inventors: Mitchell R. O'Connell, Berkeley, CA (US); Jennifer A. Doudna, Berkeley, CA (US)

(21) Appl. No.: 15/540,227

(22) PCT Filed: Jan. 27, 2016
(86) PCT No.: PCT/US16/15178

§ 371 Date: Jun. 27, 2017

Related U.S. Application Data
(60) Provisional application No. 62/108,967, filed on Jan. 28, 2015.

(51) Int. Cl. C12Q 1/68; C12Q 1/70

(52) U.S. Cl. CPC C12Q 1/6806; C12Q 1/6818; C12Q 1/701

(57) ABSTRACT

The present disclosure provides compositions and methods for labeling a single stranded target nucleic acid. Subject compositions include a Cas9 protein, a Cas9 guide RNA, and a quenched PAMmer. A subject quenched PAMmer is a single stranded oligonucleotide having (i) a protospacer adjacent motif (PAM) sequence; (ii) a detectable label; (iii) a quencher moiety that quenches the detectable label; and (iv) at least one of: a specificity segment positioned 5 of the PAM sequence, and an orientation segment positioned 3 of the PAM sequence. In the subject methods, the Cas9 protein cleaves the quenched PAMmer at a cleavage site positioned between the detectable label and the quencher moiety to produce: (a) a first cleavage product that is hybridized with the target nucleic acid and comprises the detectable label; and (b) a second cleavage product that is not hybridized with the target nucleic acid and comprises the quencher moiety.

### CROSS-REFERENCE

[0001] This application claims the benefit of U.S. Provisional Patent Application No. 62/108,967, filed Jan. 28, 2015, which application is incorporated herein by reference in its entirety.

### GOVERNMENT RIGHTS

[0002] This invention was made with Government support under contract P50GM102706-03 awarded by the National Institutes of Health. The Government has certain rights in the invention.

### INCORPORATION BY REFERENCE OF SEQUENCE LISTING PROVIDED AS A TEXT FILE

[0003] A Sequence Listing is provided herewith as a text file, “BERK-276WO-SeqList_ST25.txt” created on Jan. 25, 2016 and having a size of 7,788 KB. The contents of the text file are incorporated by reference herein in their entirety.

### INTRODUCTION

[0004] RNA-mediated adaptive immune systems in bacteria and archaea rely on Clustered Regularly Interspaced Short Palindromic Repeat (CRISPR) genomic loci and CRISPR-associated (Cas) proteins that function together to provide protection from invading viruses and plasmids. In Type II CRISPR-Cas systems, Cas9 functions as an RNA-guided endonuclease that uses a dual-guide RNA consisting of crRNA and trans-activating crRNA (tracrRNA) for target recognition and cleavage by a mechanism involving two nuclease active sites that together generate double-stranded DNA breaks (DSBs).

[0005] RNA-programmed Cas9 has proven to be a versatile tool for genome engineering in multiple cell types and organisms. Guided by a dual-RNA complex or a chimeric single-guide RNA, Cas9 can generate site-specific DSBs within double-stranded DNA (dsDNA) target nucleic acids, which are repaired either by non-homologous end joining (NHEJ) or homologous recombination (HR), and variants of Cas9 (nickases) can generate single-stranded DNA breaks (SSBs). Thus, the Cas9 system provides a facile means of modifying genomic information. Catalytically inactive Cas9 alone or fused to transcriptional activator or repressor domains can be used to alter transcription levels at sites within double-stranded DNA (dsDNA) target nucleic acids by binding to the target site without cleavage.

[0006] There is a need in the art for methods of labeling single stranded nucleic acids (e.g., single stranded DNA, mRNA, rRNA, tRNA, microRNA, etc.) with minimal off-target effects and with minimal background signals.

### SUMMARY

[0007] The present disclosure provides compositions and methods for labeling a single stranded target nucleic acid. Subject methods include contacting a single stranded target nucleic acid with a Cas9 protein, a Cas9 guide RNA, and a quenched PAMmer. A subject quenched PAMmer is a single stranded oligonucleotide having (i) a protospacer adjacent motif (PAM) sequence; (ii) a detectable label; (iii) a quencher moiety that quenches the detectable label; and (iv) at least one of: a specificity segment positioned 5′ of the PAM sequence, and an orientation segment positioned 3′ of the PAM sequence. In the subject methods, the Cas9 protein cleaves the quenched PAMmer at a cleavage site positioned between the detectable label and the quencher moiety to produce: (a) a first cleavage product that is hybridized with the target nucleic acid and comprises the detectable label; and (b) a second cleavage product that is not hybridized with the target nucleic acid and comprises the quencher moiety. In some cases, the quenched PAMmer comprises an orientation segment and a specificity segment.

[0008] The subject methods lead to cleavage of the quenched PAMmer such that one cleavage product (the first cleavage product) hybridizes to the target nucleic acid (e.g., remains hybridized to the target nucleic acid) and comprises the label (e.g., retains the detectable label) while a second cleavage product comprising the quencher moiety is not hybridized with the target nucleic acid and thus moves out of proximity of the detectable label (e.g., via diffusion), thus rendering the label detectable.

[0009] In some cases, the detectable label is positioned 3′ of the cleavage site, the quencher moiety is positioned 5′ of the cleavage site, and the quenched PAMmer comprises an orientation segment. In some cases, the detectable label is positioned 5′ of the cleavage site, the quencher moiety is positioned 3′ of the cleavage site, and the quenched PAMmer comprises a specificity segment. In some cases, the detectable label and the quencher moiety are both positioned 5′ of the PAM sequence. In some cases, the detectable label is positioned 3′ of the PAM sequence and the quencher moiety is positioned 5′ of the PAM sequence. In some cases, the detectable label is positioned 5′ of the PAM sequence and the quencher moiety is positioned 3′ of the PAM sequence. In some cases, the quenched PAMmer comprises a 5′ extension arm, positioned 5′ of the PAM sequence, wherein the 5′ extension arm comprises: (a) a nucleotide sequence that does not hybridize with the target nucleic acid, and (b) the quencher moiety. In some cases, the quenched PAMmer comprises a 3′ extension arm, positioned 3′ of the PAM sequence, wherein the 3′ extension arm comprises: (a) a nucleotide sequence that does not hybridize with the target nucleic acid, and (b) the quencher moiety.

[0010] In some cases, the PAM sequence does not hybridize with the target nucleic acid when the quenched PAMmer is hybridized with the target nucleic acid. In some cases, the target nucleic acid does not comprise a sequence that is: (i) complementary to the PAM sequence, and (ii) 5′ of and adjacent to the first target site; whereby the PAM sequence does not hybridize with the target nucleic acid when the quenched PAMmer is hybridized with the target nucleic acid.

[0011] In some cases, the detectable label is a fluorescent label (e.g., a fluorescent label selected from: an Alexa Fluor® dye, an ATTO dye (e.g., ATTO 390, ATTO 425, ATTO 465, ATTO 488, ATTO 495, ATTO 514, ATTO 520, ATTO 532, ATTO Rho6G, ATTO 542, ATTO 550, ATTO 565, ATTO Rho3B, ATTO Rho11, ATTO Rho12, ATTO Thio12, ATTO Rho101, ATTO 590, ATTO 594, ATTO Rho13, ATTO 610, ATTO 620, ATTO Rho14, ATTO 633, ATTO 647, ATTO 647N, ATTO 655, ATTO Oxa12, ATTO 665, ATTO 680, ATTO 700, ATTO 725, ATTO 740), a DyLight dye, a cyanine dye (e.g., Cy2, Cy3, Cy3.5, Cy3b, Cy5, Cy5.5, Cy7, Cy7.5), a FluoProbes dye, a Sulfo Cy dye, a Seta dye, an IRIS Dye, a SeTau dye, an SRfluor dye, a Square dye, fluorescein (FITC), tetramethylrhodamine (TRITC), Texas Red, Oregon Green, Pacific Blue, Pacific Green, Pacific Orange, and a Biotium fluorescent dye (e.g., CF 640R, e.g., iCF640RN)).

[0012] In some cases, the quencher moiety can quench a fluorescent label (i.e., can quench a signal from a fluorescent label) (e.g., all fluorescent labels; fluorescent labels having emission spectra within a particular range; etc.). In some cases, the quencher moiety is a dark quencher. In some cases, the quencher moiety is selected from: a dark quencher, a Black Hole Quencher® (BHQ®) (e.g., BHQ-0, BHQ-1, BHQ-2, BHQ-3), a Qxl quencher, an ATTO quencher (e.g., ATTO 540Q, ATTO 580Q, and ATTO 612Q), dimethylaminoazobenzenesulfonic acid (Dabsyl), Iowa Black RQ (e.g., 5IAbRQ, iIB-QB), Iowa Black FQ (e.g., 5IAbkFQ), ZEN, IRDye QC-1, a QSY dye (e.g., QSY 7, QSY 9, QSY 21), AbsoluteQuencher, Eclipse, and a metal cluster.

[0013] In some cases, a target nucleic acid is a single stranded RNA (ssRNA). In some cases, a target ssRNA (e.g., a target cell ssRNA, a viral ssRNA, etc.) is selected from: mRNA, rRNA, tRNA, non-coding RNA (ncRNA), long non-coding RNA (lncRNA), and microRNA (miRNA). In some cases, a target nucleic acid is a single stranded DNA (ssDNA) (e.g., a viral DNA). The subject methods can be performed outside of a cell in vitro, inside of a cell (e.g., in a living cell) in vitro or ex vivo, and/or inside of a cell (e.g., in a living cell) in vivo. Also provided are kits and libraries for performing the disclosed methods.

### Features

[0014] Features of the present disclosure include a method of labeling a single stranded target nucleic acid, the method comprising contacting a single stranded target nucleic acid having a first target site comprising a first sequence of nucleotides and a second target site comprising a second sequence of nucleotides, wherein the second target site is positioned on the target nucleic acid 5′ of the first target site, with: (a) a quenched PAMmer, wherein the quenched PAMmer is a single stranded oligonucleotide comprising: (a.i) a protospacer adjacent motif (PAM) sequence, (a.ii) a detectable label, (a.iii) a quencher moiety that quenches the detectable label, and (a.iv) at least one of: a specificity segment, positioned 5′ of the PAM sequence, that hybridizes with nucleotides of the first target site, and an orientation segment, positioned 3′ of the PAM sequence, that hybridizes with nucleotides of the second target site; (b) a Cas9 protein; and (c) a Cas9 guide RNA that forms a complex with the Cas9 protein and hybridizes with the first target site, whereby the Cas9 protein cleaves the quenched PAMmer at a cleavage site positioned between the detectable label and the quencher moiety to produce: (i) a first cleavage product that is hybridized with the target nucleic acid and comprises the detectable label; and (ii) a second cleavage product that is not hybridized with the target nucleic acid and comprises the quencher moiety.

[0015] In some cases, the detectable label is positioned 3′ of the cleavage site, the quencher moiety is positioned 5′ of the cleavage site, and the quenched PAMmer comprises an orientation segment. In some cases, the detectable label is positioned 5′ of the cleavage site, the quencher moiety is positioned 3′ of the cleavage site, and the quenched PAMmer comprises a specificity segment. In some cases, the detectable label and the quencher moiety are both positioned 5′ of the PAM sequence. In some cases, the detectable label is positioned 3′ of the PAM sequence and the quencher moiety is positioned 5′ of the PAM sequence. In some cases, the detectable label is positioned 5′ of the PAM sequence and the quencher moiety is positioned 3′ of the PAM sequence. In some cases, the quenched PAMmer comprises an orientation segment and a specificity segment. In some cases, the quenched PAMmer comprises a 5′ extension arm, positioned 5′ of the PAM sequence, wherein the 5′ extension arm comprises: (a) a nucleotide sequence that does not hybridize with the target nucleic acid, and (b) the quencher moiety. In some cases, the quenched PAMmer comprises a 3′ extension arm, positioned 3′ of the PAM sequence, wherein the 3′ extension arm comprises: (a) a nucleotide sequence that does not hybridize with the target nucleic acid, and (b) the quencher moiety. In some cases, the PAM sequence is GG. In some cases, the PAM sequence is 5′-NGG-3′, wherein N can be any nucleotide. In some cases, the PAM sequence does not hybridize with the target nucleic acid when the quenched PAMmer is hybridized with the target nucleic acid. In some cases, the target nucleic acid does not comprise a sequence that is: (i) complementary to the PAM sequence, and (ii) 5′ of and adjacent to the first target site; whereby the PAM sequence does not hybridize with the target nucleic acid when the quenched PAMmer is hybridized with the target nucleic acid.

[0016] In some cases, 10 or fewer nucleotides are present in the target nucleic acid between the first and second target sites. In some cases, 2 or 3 nucleotides are present in the target nucleic acid between the first and second target sites. In some cases, the detectable label is a fluorescent label. In some cases, the fluorescent label is selected from: an Alexa Fluor® dye, an ATTO dye, a DyLight dye, a cyanine dye, a FluoProbes dye, a Sulfo Cy dye, a Seta dye, an IRIS Dye, a SeTau dye, an SRfluor dye, a Square dye, fluorescein (FITC), tetramethylrhodamine (TRITC), Texas Red, Oregon Green, Pacific Blue, Pacific Green, Pacific Orange, and a Biotium fluorescent dye (e.g., CF 640R, e.g., iCF640RN). In some cases, the quencher moiety is a dark quencher. In some cases, the quencher moiety is selected from: a dark quencher, a Black Hole Quencher® (BHQ®), a Qxl quencher, an ATTO quencher, dimethylaminoazobenzenesulfonic acid (Dabsyl), Iowa Black RQ (e.g., 5IAbRQ, iIB-QB), Iowa Black FQ (e.g., 5IAbkFQ), ZEN, IRDye QC-1, a QSY dye, AbsoluteQuencher, Eclipse, and a metal cluster. In some cases, the PAMmer comprises two or more detectable labels. In some cases, the PAMmer comprises two or more quencher moieties.

[0017] In some cases, the single stranded target nucleic acid is a single stranded RNA (ssRNA). In some cases, the target ssRNA is selected from: mRNA, rRNA, tRNA, non-coding RNA (ncRNA), long non-coding RNA (lncRNA), and microRNA (miRNA). In some cases, the target ssRNA is mRNA and the method results in a detectably labeled mRNA. In some cases, the single stranded target nucleic acid is single stranded DNA (ssDNA). In some cases, the single stranded target nucleic acid is from a virus.

[0018] In some cases, the contacting is outside of a cell in vitro. In some cases, the contacting is in a target cell in vitro or ex vivo. In some cases, the contacting is in a target cell in vivo. In some cases, the target cell is a living cell.

[0019] In some cases, the Cas9 guide RNA is a DNA/RNA hybrid nucleic acid comprising deoxyribonucleotides that hybridize with the target nucleic acid. In some cases, the Cas9 guide RNA is a Cas9 dual guide RNA. In some cases, the Cas9 guide RNA is a Cas9 single guide RNA. In some cases, the Cas9 protein is a variant Cas9 protein that cleaves the quenched PAMmer but does not cleave the target nucleic acid. In some cases, the variant Cas9 protein has a mutation in the HNH domain relative to a wild type Cas9 protein. In some cases, the Cas9 protein cleaves the quenched PAMmer and modifies the target nucleic acid. In some cases, the Cas9 protein cleaves the quenched PAMmer and cleaves the target nucleic acid.

[0020] Features of the present disclosure include a method of detecting a single stranded target nucleic acid in a sample, wherein the target nucleic acid comprises a first target site comprising a first sequence of nucleotides and a second target site comprising a second sequence of nucleotides, wherein the second target site is positioned on the target nucleic acid 5′ of the first target site, the method comprising: (I) contacting the sample with: (a) a quenched PAMmer, wherein the quenched PAMmer is a single stranded oligonucleotide comprising: (a.i) a protospacer adjacent motif (PAM) sequence, (a.ii) a detectable label, (a.iii) a quencher moiety that quenches the detectable label, and (a.iv) at least one of: a specificity segment, positioned 5′ of the PAM sequence, that hybridizes with nucleotides of the first target site, and an orientation segment, positioned 3′ of the PAM sequence, that hybridizes with nucleotides of the second target site; (b) a Cas9 protein; and (c) a Cas9 guide RNA that forms a complex with the Cas9 protein and hybridizes with the first target site, whereby the Cas9 protein cleaves the quenched PAMmer at a cleavage site positioned between the detectable label and the quencher moiety to produce: (i) a first cleavage product that is hybridized with the target nucleic acid and comprises the detectable label; and (ii) a second cleavage product that is not hybridized with the target nucleic acid and comprises the quencher moiety; and (II) measuring a signal from the detectable label.

[0021] In some cases, the detecting is quantitative. In some cases, the detecting is qualitative. In some cases, the sample comprises single stranded nucleic acids that are not in a cell. In some cases, the sample comprises a cell and the target nucleic acid is in the cell.

[0022] Features of the present disclosure include a composition comprising: (i) a quenched PAMmer, wherein the quenched PAMmer is a single stranded oligonucleotide comprising: (a) a protospacer adjacent motif (PAM) sequence, (b) a detectable label, (c) a quencher moiety that quenches the detectable label, and (d) at least one of: a specificity segment, positioned 5′ of the PAM sequence, that hybridizes with nucleotides of a first target site of a target nucleic acid, and an orientation segment, positioned 3′ of the PAM sequence, that hybridizes with nucleotides of a second target site of the target nucleic acid; and (ii) a Cas9 guide RNA comprising a nucleotide sequence that hybridizes with the first target site of the target nucleic acid.

[0023] Features of the present disclosure include a kit comprising: (i) a quenched PAMmer, wherein the quenched PAMmer is a single stranded oligonucleotide comprising: (a) a protospacer adjacent motif (PAM) sequence, (b) a detectable label, (c) a quencher moiety that quenches the detectable label, and (d) at least one of: a specificity segment, positioned 5′ of the PAM sequence, that hybridizes with nucleotides of a first target site of a target nucleic acid, and an orientation segment, positioned 3′ of the PAM sequence, that hybridizes with nucleotides of a second target site of the target nucleic acid; and (ii) a Cas9 guide RNA comprising a nucleotide sequence that hybridizes with the first target site of the target nucleic acid; wherein (i) and (ii) are present in the same or separate containers.

[0024] Features of the present disclosure include a library comprising: two or more labeling nucleic acid pairs, wherein each labeling nucleic acid pair comprises: (i) a quenched PAMmer, wherein the quenched PAMmer is a single stranded oligonucleotide comprising: (a) a protospacer adjacent motif (PAM) sequence, (b) a detectable label, (c) a quencher moiety that quenches the detectable label, and (d) at least one of: a specificity segment, positioned 5′ of the PAM sequence, that hybridizes with nucleotides of a first target site of a target nucleic acid, and an orientation segment, positioned 3′ of the PAM sequence, that hybridizes with nucleotides of a second target site of the target nucleic acid; and (ii) a Cas9 guide RNA comprising a nucleotide sequence that hybridizes with the first target site of the target nucleic acid.

### BRIEF DESCRIPTION OF THE DRAWINGS

[0025] FIG. 1 presents binding assays for Cas9 binding to single stranded target nucleic acid molecules (e.g., single stranded RNA (ssRNA)) in the presence of a protospacer adjacent motif (PAM)-containing oligonucleotide (“PAMmer”).

[0026] FIGS. 2A-B present assays for binding of single stranded target nucleic acid stabilized by PAMmers of increasing length, and the effect of PAM sequence base-pairing with the single stranded target nucleic acid.

[0027] FIG. 3 presents assays for Cas9 cleavage of a single stranded RNA (ssRNA) target nucleic acid when used in combination with a PAMmer.

[0028] FIGS. 4A-B presents assays for activation of Cas9 cleavage by a DNA oligonucleotide complementary to a single stranded target nucleic acid (e.g., ssRNA), but lacking the PAM; and assays for activation of Cas9 cleavage where a PAMmer includes a specificity segment.

[0029] FIGS. 5A-C present binding and cleavage assays testing off-target effects and employing various PAMmers. λ2 (SEQ ID NO:1361); λ3 (SEQ ID NO:1362); λ4 (SEQ ID NO:1363).

[0030] FIG. 6 presents cleavage assays employing various PAMmers.

[0031] FIGS. 7A-D present assays for cleavage and binding by Cas9 of a single stranded DNA (ssDNA) target nucleic acid when used in combination with a PAMmer.

[0032] FIGS. 8A-I provide a schematic drawing of example embodiments of subject compositions and methods. Note that the vertical lines representing hybridization are not to scale and do not necessarily represent the actual number of bases hybridized (base pairs) for any particular segment/region. (A-B) Each embodiment depicted includes a PAMmer, which is hybridized to a single stranded target nucleic acid; and a Cas9 guide RNA, which is hybridized to the target nucleic acid and is associated with a Cas9 protein. (C-D) Each embodiment depicted includes a PAMmer having a specificity segment and an orientation segment. The PAM sequence is complementary to the target nucleic acid in 8C and is not complementary to the target nucleic acid in 8D. (E) Two possible embodiments of a PAMmer having a specificity segment and not having an orientation segment. (F) Two possible embodiments of a PAMmer having an orientation segment and not having a specificity segment. (G-I) Three example embodiments of a subject quenched PAMmer. Note that in panels G and H, the detectable label can be located at any convenient position 3′ of the cleavage site, and the quencher moiety can be located at any convenient position 5′ of the cleavage site, as long at the quencher moiety quenches the signal from the detectable label prior to cleavage. Note that in panel I, the detectable label can be located at any convenient position 5′ of the cleavage site, and the quencher moiety can be located at any convenient position 3′ of the cleavage site, as long at the quencher moiety quenches the signal from the detectable label prior to cleavage.

[0033] FIGS. 9A-B depict the amino acid sequence of a Cas9 protein from Streptococcus pyogenes (SEQ ID NO:8). Cas9 has domains homologous to both HNH and RuvC endonucleases. (A) Motifs 1-4 are overlined. (B) Domains 1 and 2 are overlined.

[0034] FIG. 10 depicts a multiple sequence alignment of motifs 1-4 of Cas9 proteins from various diverse species. (Streptococcus pyogenes (SEQ ID NO:8), Legionella pneumophila (SEQ ID NO:17), Gamma proteobacterium (SEQ ID NO:107), Listeria innocua (SEQ ID NO:3), Lactobacillus gasseri (SEQ ID NO:152), Eubacterium rectale (SEQ ID NO:99), Staphylococcus lugdunensis (SEQ ID NO:185), Mycoplasma synoviae (SEQ ID NO:22), Mycoplasma mobile (SEQ ID NO:16), Wolinella succinogenes (SEQ ID NO:10), Flavobacterium columnare (SEQ ID NO:235), Fibrobacter succinogenes (SEQ ID NO:121), Bacteroides fragilis (SEQ ID NO:21), Acidothermus cellulolyticus (SEQ ID NO:42), and Bifidobacterium dentium (SEQ ID NO:131).

[0035] FIGS. 11A-B provide alignments of naturally occurring tracrRNA (“activator”) sequences from various species (L. innocua (SEQ ID NO:268); S. pyogenes (SEQ ID NO:267); S. mutans (SEQ ID NO:269); S. thermophilus1 (SEQ ID NO:270); M. mobile (SEQ ID NO:274); N. meningitides (SEQ ID NO:272); P. multocida (SEQ ID NO:273); S. thermophilus2 (SEQ ID NO:271); and S. pyogenes (SEQ ID NO:267). (A) multiple sequence alignment of selected tracrRNA orthologues (AlignX, VectorNTI package, Invitrogen) associated with CRISPR/Cas loci of similar architecture and highly similar Cas9 sequences. Black boxes represent shared nucleotides (B) multiple sequence alignment of selected tracrRNA orthologues (AlignX, VectorNTI package, Invitrogen) associated with CRISPR/Cas loci of different architecture and non-closely related Cas9 sequences. Note the sequence similarity of N. meningitidis and P. multocida tracrRNA orthologues. Black boxes represent shared nucleotides. For more exemplary activator sequences, see SEQ ID NOs:431-562.

[0036] FIGS. 12A-B provide alignments of naturally occurring duplex-forming segments of crRNA (“targeter”) sequences from various species (L. innocua (SEQ ID NO:577); S. pyogenes (SEQ ID NO:569); S. mutans (SEQ ID NO:574); S. thermophilus1 (SEQ ID NO:575); C. jejuni (SEQ ID NO:597); S. pyogenes (SEQ ID NO:569); F. novicida (SEQ ID NO:572); M. mobile (SEQ ID NO:571); N. meningitides (SEQ ID NO:579); P. multocida (SEQ ID NO:570); and S. thermophilus2 (SEQ ID NO:576). (A) multiple sequence alignments of exemplary duplex-forming segment of targeter sequences (AlignX, VectorNTI package, Invitrogen) associated with the loci of similar architecture and highly similar Cas9 sequences. (B) multiple sequence alignments of exemplary duplex-forming segment of targeter sequences (AlignX, VectorNTI package, Invitrogen) associated with the loci of different architecture and diverse Cas9 sequences. Black boxes represent shared nucleotides. For more exemplary duplex-forming segments targeter sequences, see SEQ ID NOs:563-679.

[0037] FIG. 13 provides a schematic of hybridization for naturally occurring duplex-forming segments of the crRNA (“targeter”) with the duplex-forming segment of the corresponding tracrRNA orthologue (“activator”). Upper sequence, targeter; lower sequence, duplex-forming segment of the corresponding activator. The CRISPR loci belong to the Type II (Nmeni/CASS4) CRISPR/Cas system. Nomenclature is according to the CRISPR database (CRISPR DB). SEQ ID numbers are listed top to bottom: S. pyogenes (SEQ ID NOs:569 and 442); S. mutans (SEQ ID NOs:574 and 443); S. thermophilus1 (SEQ ID NOs:575 and 444); S. thermophilus2 (SEQ ID NOs:576 and 445); L. innocua (SEQ ID NOs:577 and 446); T. denticola (SEQ ID NOs:578 and 448); N. meningitides (SEQ ID NOs:579 and 449); S. gordonii (SEQ ID NOs:580 and 451); B. bifidum (SEQ ID NOs:581 and 452); L. salivarius (SEQ ID NOs:582 and 453); F. tularensis (SEQ ID NOs:583, 454, 584, and 455); and L. pneumophila (SEQ ID NOs:585 and 456). Note that some species contain more than one Type II CRISPR locus. For more exemplary activator sequences, see SEQ ID NOs:431-562. For more exemplary duplex-forming segments of targeter sequences, see SEQ ID NOs:563-679.

[0038] FIG. 14 depicts example tracrRNA (activator) and crRNA (targeter) sequences from two species. A degree of interchangeability exists; for example, the S. pyogenes Cas9 protein is functional with tracrRNA and crRNA derived from L. innocua. “|” denotes a canonical Watson-Crick base pair while “•” denotes a G-U wobble base pair. “Variable 20 nt” or “20 nt” represents the targeting segment that is complementary to a target nucleic acid (this region can be up to about 100 nt in length). Also shown is one possible design of a Cas9 single guide RNA that incorporates features of the targeter and the activator. Cas9 protein sequences from a wide variety of species are set forth as SEQ ID NOs:1-256 and 795-1346. Streptococcus pyogenes (top to bottom, SEQ ID NOs: 563, 478, 680); Listeria innocua (top to bottom, SEQ ID NOs: 564, 479, 681). The sequences provided are non-limiting examples and are meant to illustrate how single and Cas9 dual guide RNAs can be designed based on targeter and activator sequences from a wide variety of species. Various examples of suitable sequences from a wide variety of species are set forth as follows (Cas9 protein: SEQ ID NOs:1-259; tracrRNAs: SEQ ID NOs:431-562, or the complements thereof; crRNAs: SEQ ID NOs:563-679, or the complements thereof; and exemplary Cas9 single guide RNAs designed from targeter and activator sequences: SEQ ID NOs:680-682).

[0039] FIGS. 15A-D list examples of suitable fusion partners (or fragments thereof) for a Cas9 protein (e.g., wild type Cas9, variant Cas9). Suitable fusion partners include, but are not limited to, those listed.

[0040] FIGS. 16A-D depict the effect of Cas9 amino acid sequence modifications on target nucleic acid cleavage; and provide alignments of selected regions of Cas9 proteins. (C) Top to bottom (SEQ ID NOs:1364-1375). (D) Top to bottom (SEQ ID NOs:1376-1391).

[0041] FIGS. 17A-B depict the effect of nucleotide modifications in PAMmer on target nucleic acid binding and cleavage.

[0042] FIGS. 18A-E depict RNA-guided Cas9 cleavage of ssRNA targets in the presence of a short PAM presenting DNA oligonucleotide (PAMmer). “PAMmer” (SEQ ID NO: 1471); “Target ssRNA” (SEQ ID NO: 1472).

[0043] FIGS. 19A-C depict the effect of the presence of PAMmers on dCas9-gRNA binding to ssRNA targets.

[0044] FIGS. 20A-D depict the effect of 5′-extended PAMmers on specific target ssRNA binding.

[0045] FIGS. 21A-H depict RNA-guided Cas9 targeting of non-PAM sites on ssRNA; and isolation of GAPDH mRNA from HeLa cells in a tagless manner (H) (Top to bottom, SEQ ID NOs: 1473-1478).

[0046] FIG. 22 depicts quantified data for cleavage of ssRNA by Cas9-gRNA in the presence of a 19-nucleotide PAMmer.

[0047] FIG. 23 depicts the effect of di- and tri-deoxyribonucleotides on RNA cleavage.

[0048] FIG. 24 provides a representative binding experiment demonstrating guide-specific ssRNA binding with 5′-extended PAMmers.

[0049] FIGS. 25A-B depict RNA cleavage efficiencies and binding specificity using PAMmers with variable 5′-extensions.

[0050] FIGS. 26A-E provide data related to site-specific biotin labeling of Cas9.

[0051] FIG. 27 depicts the effect of chemically modified PAMmers on RNA-guided Cas9 cleavage.

[0052] FIGS. 28A-B depict pull down of GAPDH mRNA in the absence of PAMmers Cas9 programmed with GAPDH-specific gRNAs.

[0053] FIGS. 29A-B provide data relating to Cas9 cleaving PAMmers having a 5′ extension arm.

[0054] FIGS. 30A-E provide data relating to quenched PAMmers facilitating cleavage-mediated fluorescence

[0055] FIG. 31 presents a schematic of one possible guide RNA. The depicted guide RNA is a single guide RNA with a targeter covalently linked to an activator via 4 linker nucleotides. The nucleotides are 5′ to 3′ from left to right.

[0056] FIG. 32 presents a graphical illustration of the data presented in Table 3 (see Example 7).

[0057] FIG. 33 presents a graphical illustration of the data presented in Table 4 (see Example 7).

### DEFINITIONS

[0058] The terms “polynucleotide” and “nucleic acid,” used interchangeably herein, refer to a polymeric form of nucleotides of any length, either ribonucleotides or deoxyribonucleotides. Thus, terms “polynucleotide” and “nucleic acid” encompass single-stranded DNA; double-stranded DNA; multi-stranded DNA; single-stranded RNA; double-stranded RNA; multi-stranded RNA; genomic DNA; cDNA; DNA-RNA hybrids; and a polymer comprising purine and pyrimidine bases or other natural, chemically or biochemically modified, non-natural, or derivatized nucleotide bases.

[0059] The term “oligonucleotide” refers to a polynucleotide of between 3 and 100 nucleotides of single- or double-stranded nucleic acid (e.g., DNA, RNA, or a modified nucleic acid). However, for the purposes of this disclosure, there is no upper limit to the length of an oligonucleotide. Oligonucleotides are also known as “oligomers” or “oligos” and can be isolated from genes, transcribed (in vitro and/or in vivo), or chemically synthesized. The terms “polynucleotide” and “nucleic acid” should be understood to include, as applicable to the embodiments being described, single-stranded (such as sense or antisense) and double-stranded polynucleotides.

[0060] A “stem-loop structure” refers to a nucleic acid having a secondary structure that includes a region of nucleotides which are known or predicted to form a double strand (step portion) that is linked on one side by a region of predominantly single-stranded nucleotides (loop portion). The terms “hairpin” and “fold-back” structures are also used herein to refer to stem-loop structures. Such structures are well known in the art and these terms are used consistently with their known meanings in the art. As is known in the art, a stem-loop structure does not require exact base-pairing. Thus, the stem may include one or more base mismatches. Alternatively, the base-pairing may be exact, i.e. not include any mismatches.

[0061] By “hybridizable” or “complementary” or “substantially complementary” it is meant that a nucleic acid (e.g. RNA, DNA) comprises a sequence of nucleotides that enables it to non-covalently bind, i.e. form Watson-Crick base pairs and/or G/U base pairs, “anneal”, or “hybridize,” to another nucleic acid in a sequence-specific, antiparallel, manner (i.e., a nucleic acid specifically binds to a complementary nucleic acid) under the appropriate in vitro and/or in vivo conditions of temperature and solution ionic strength. Standard Watson-Crick base-pairing includes: adenine (A) pairing with thymidine (T), adenine (A) pairing with uracil (U), and guanine (G) pairing with cytosine (C) [DNA, RNA]. In addition, for hybridization between two RNA molecules (e.g., dsRNA), and for hybridization of a DNA molecule with an RNA molecule (e.g., when a ssRNA target nucleic acid base pairs with a DNA PAMmer, when a DNA target nucleic acid base pairs with a Cas9 guide RNA, etc.): guanine (G) can also base pair with uracil (U). For example, G/U base-pairing is partially responsible for the degeneracy (i.e., redundancy) of the genetic code in the context of tRNA anti-codon base-pairing with codons in mRNA. Thus, in the context of this disclosure, a guanine (G) (e.g., of a protein-binding segment (dsRNA duplex) of a Cas9 guide RNA molecule; of a target nucleic acid base pairing with a Cas9 guide RNA and/or a PAMmer, etc.) is considered complementary to both a uracil (U) and to an adenine (A). For example, when a G/U base-pair can be made at a given nucleotide position of a protein-binding segment (e.g., dsRNA duplex) of a Cas9 guide RNA molecule, the position is not considered to be non-complementary, but is instead considered to be complementary.

[0062] Hybridization and washing conditions are well known and exemplified in Sambrook, J., Fritsch, E. F. and Maniatis, T. Molecular Cloning: A Laboratory Manual, Second Edition, Cold Spring Harbor Laboratory Press, Cold Spring Harbor (1989), particularly Chapter 11 and Table 11.1 therein; and Sambrook, J. and Russell, W., Molecular Cloning: A Laboratory Manual, Third Edition, Cold Spring Harbor Laboratory Press, Cold Spring Harbor (2001). The conditions of temperature and ionic strength determine the “stringency” of the hybridization.

[0063] Hybridization requires that the two nucleic acids contain complementary sequences, although mismatches between bases are possible. The conditions appropriate for hybridization between two nucleic acids depend on the length of the nucleic acids and the degree of complementarity, variables well known in the art. The greater the degree of complementarity between two nucleotide sequences, the greater the value of the melting temperature (Tm) for hybrids of nucleic acids having those sequences. For hybridizations between nucleic acids with short stretches of complementarity (e.g. complementarity over 35 or fewer, 30 or fewer, 25 or fewer, 22 or fewer, 20 or fewer, or 18 or fewer nucleotides) the position of mismatches can become important (see Sambrook et al., supra, 11.7-11.8). Typically, the length for a hybridizable nucleic acid is 8 nucleotides or more (e.g., 10 nucleotides or more, 12 nucleotides or more, 15 nucleotides or more, 20 nucleotides or more, 22 nucleotides or more, 25 nucleotides or more, or 30 nucleotides or more). The temperature and wash solution salt concentration may be adjusted as necessary according to factors such as length of the region of complementation and the degree of complementation.

[0064] It is understood that the sequence of a polynucleotide need not be 100% complementary to that of its target nucleic acid to be specifically hybridizable or hybridizable. Moreover, a polynucleotide may hybridize over one or more segments such that intervening or adjacent segments are not involved in the hybridization event (e.g., a loop structure or hairpin structure). A polynucleotide can comprise 60% or more, 65% or more, 70% or more, 75% or more, 80% or more, 85% or more, 90% or more, 95% or more, 98% or more, 99% or more, 99.5% or more, or 100% sequence complementarity to a target region within the target nucleic acid sequence to which it will hybridize. For example, an antisense nucleic acid in which 18 of 20 nucleotides of the antisense compound are complementary to a target region, and would therefore specifically hybridize, would represent 90 percent complementarity. In this example, the remaining noncomplementary nucleotides may be clustered or interspersed with complementary nucleotides and need not be contiguous to each other or to complementary nucleotides. Percent complementarity between particular stretches of nucleic acid sequences within nucleic acids can be determined using any convenient method. Exemplary methods include BLAST programs (basic local alignment search tools) and PowerBLAST programs (Altschul et al., J. Mol. Biol., 1990, 215, 403-410; Zhang and Madden, Genome Res., 1997, 7, 649-656) or by using the Gap program (Wisconsin Sequence Analysis Package, Version 8 for Unix, Genetics Computer Group, University Research Park, Madison Wis.), using default settings, which uses the algorithm of Smith and Waterman (Adv. Appl. Math., 1981, 2, 482-489).

[0065] The terms “peptide,” “polypeptide,” and “protein” are used interchangeably herein, and refer to a polymeric form of amino acids of any length, which can include coded and non-coded amino acids, chemically or biochemically modified or derivatized amino acids, and polypeptides having modified peptide backbones.

[0066] “Binding” as used herein (e.g. with reference to an RNA-binding domain of a polypeptide, binding to a target nucleic acid, and the like) refers to a non-covalent interaction between macromolecules (e.g., between a protein and a nucleic acid; between a Cas9 guide RNA complex and a target nucleic acid; and the like). While in a state of non-covalent interaction, the macromolecules are said to be “associated” or “interacting” or “binding” (e.g., when a molecule X is said to interact with a molecule Y, it is meant the molecule X binds to molecule Y in a non-covalent manner). Not all components of a binding interaction need be sequence-specific (e.g., contacts with phosphate residues in a DNA backbone), but some portions of a binding interaction may be sequence-specific. Binding interactions are generally characterized by a dissociation constant (K_{d}) of less than 10⁻⁶ M, less than 10⁻⁷ M, less than 10⁻⁸ M, less than 10⁻⁹ M, less than 10⁻¹⁰ M, less than 10⁻¹¹ M, less than 10⁻¹² M, less than 10⁻¹³ M, less than 10⁻¹⁴ M, or less than 10⁻¹⁵ M. “Affinity” refers to the strength of binding, increased binding affinity being correlated with a lower K_{d}.

[0067] By “binding domain” it is meant a protein domain that is able to bind non-covalently to another molecule. A binding domain can bind to, for example, a DNA molecule (a DNA-binding domain), an RNA molecule (an RNA-binding domain) and/or a protein molecule (a protein-binding domain). In the case of a protein having a protein-binding domain, it can in some cases bind to itself (to form homodimers, homotrimers, etc.) and/or it can bind to one or more regions of a different protein or proteins.

[0068] The term “conservative amino acid substitution” refers to the interchangeability in proteins of amino acid residues having similar side chains. For example, a group of amino acids having aliphatic side chains consists of glycine, alanine, valine, leucine, and isoleucine; a group of amino acids having aliphatic-hydroxyl side chains consists of serine and threonine; a group of amino acids having amide containing side chains consisting of asparagine and glutamine; a group of amino acids having aromatic side chains consists of phenylalanine, tyrosine, and tryptophan; a group of amino acids having basic side chains consists of lysine, arginine, and histidine; a group of amino acids having acidic side chains consists of glutamate and aspartate; and a group of amino acids having sulfur containing side chains consists of cysteine and methionine. Exemplary conservative amino acid substitution groups are: valine-leucine-isoleucine, phenylalanine-tyrosine, lysine-arginine, alanine-valine-glycine, and asparagine-glutamine.

[0069] A polynucleotide or polypeptide has a certain percent “sequence identity” to another polynucleotide or polypeptide, meaning that, when aligned, that percentage of bases or amino acids are the same, and in the same relative position, when comparing the two sequences. Sequence identity can be determined in a number of different ways. To determine sequence identity, sequences can be aligned using various methods and computer programs (e.g., BLAST, T-COFFEE, MUSCLE, MAFFT, etc.), available over the world wide web at sites including ncbi.nlm.nili.gov/BLAST, ebi.ac.uk/Tools/msa/tcoffee/, ebi.ac.uk/Tools/msa/muscle/, mafft.cbrc.jp/alignment/software/. See, e.g., Altschul et al. (1990), J. Mol. Bioi. 215:403-10.

[0070] A DNA sequence that “encodes” a particular RNA is a DNA nucleic acid sequence that is transcribed into RNA. A DNA polynucleotide may encode an RNA (mRNA) that is translated into protein, or a DNA polynucleotide may encode an RNA that is not translated into protein (e.g. tRNA, rRNA, microRNA (miRNA), a “non-coding” RNA (ncRNA), a Cas9 guide RNA, etc.).

[0071] A “protein coding sequence” or a sequence that encodes a particular protein or polypeptide, is a nucleic acid sequence that is transcribed into mRNA (in the case of DNA) and is translated (in the case of mRNA) into a polypeptide in vitro or in vivo when placed under the control of appropriate regulatory sequences. The boundaries of the coding sequence are determined by a start codon at the 5′ terminus (N-terminus) and a translation stop nonsense codon at the 3′ terminus (C-terminus). A coding sequence can include, but is not limited to, cDNA from prokaryotic or eukaryotic mRNA, genomic DNA sequences from prokaryotic or eukaryotic DNA, and synthetic nucleic acids. A transcription termination sequence will usually be located 3′ to the coding sequence.

[0072] The terms “DNA regulatory sequences,” “control elements,” and “regulatory elements,” used interchangeably herein, refer to transcriptional and translational control sequences, such as promoters, enhancers, polyadenylation signals, terminators, protein degradation signals, and the like, that provide for and/or regulate transcription of a non-coding sequence (e.g., Cas9 guide RNA) or a coding sequence (e.g., Cas9 protein) and/or regulate translation of an encoded polypeptide.

[0073] As used herein, a “promoter sequence” is a DNA regulatory region capable of binding RNA polymerase and initiating transcription of a downstream (3′ direction) coding or non-coding sequence. For purposes of the present disclosure, the promoter sequence is bounded at its 3′ terminus by the transcription initiation site and extends upstream (5′ direction) to include the minimum number of bases or elements necessary to initiate transcription at levels detectable above background. Within the promoter sequence will be found a transcription initiation site, as well as protein binding domains responsible for the binding of RNA polymerase. Eukaryotic promoters will often, but not always, contain “TATA” boxes and “CAT” boxes. Various promoters, including inducible promoters, may be used to drive the various vectors of the present disclosure.

[0074] The term “naturally-occurring” or “unmodified” or “wild type” as used herein as applied to a nucleic acid, a polypeptide, a cell, or an organism, refers to a nucleic acid, polypeptide, cell, or organism that is found in nature. For example, a polypeptide or polynucleotide sequence that is present in an organism (including viruses) that can be isolated from a source in nature and which has not been intentionally modified by a human in the laboratory is wild type (and naturally occurring).

[0075] The term “chimeric” as used herein as applied to a nucleic acid or polypeptide refers to two components that are defined by structures derived from different sources. For example, where “chimeric” is used in the context of a chimeric polypeptide (e.g., a chimeric Cas9 protein), the chimeric polypeptide includes amino acid sequences that are derived from different polypeptides. A chimeric polypeptide may comprise either modified or naturally-occurring polypeptide sequences (e.g., a first amino acid sequence from a modified or unmodified Cas9 protein; and a second amino acid sequence other than the Cas9 protein). Similarly, “chimeric” in the context of a polynucleotide encoding a chimeric polypeptide includes nucleotide sequences derived from different coding regions (e.g., a first nucleotide sequence encoding a modified or unmodified Cas9 protein; and a second nucleotide sequence encoding a polypeptide other than a Cas9 protein).

[0076] The term “chimeric polypeptide” refers to a polypeptide which is made by the combination (i.e., “fusion”) of two otherwise separated segments of amino sequence, usually through human intervention. A polypeptide that comprises a chimeric amino acid sequence is a chimeric polypeptide. Some chimeric polypeptides can be referred to as “fusion variants.”

[0077] “Heterologous,” as used herein, means a nucleotide or polypeptide sequence that is not found in the native nucleic acid or protein, respectively. For example, in a chimeric Cas9 protein, the RNA-binding domain of a naturally-occurring bacterial Cas9 protein (or a variant thereof) may be fused to a heterologous polypeptide sequence (i.e. a polypeptide sequence from a protein other than Cas9 or a polypeptide sequence from another organism). The heterologous polypeptide sequence may exhibit an activity (e.g., enzymatic activity) that will also be exhibited by the chimeric Cas9 protein (e.g., methyltransferase activity, acetyltransferase activity, kinase activity, ubiquitinating activity, etc.). A heterologous nucleic acid sequence may be linked to a naturally-occurring nucleic acid sequence (or a variant thereof) (e.g., by genetic engineering) to generate a chimeric nucleotide sequence encoding a chimeric polypeptide. As another example, in a fusion variant Cas9 protein, a variant Cas9 protein may be fused to a heterologous polypeptide (i.e. a polypeptide other than Cas9), which exhibits an activity that will also be exhibited by the fusion variant Cas9 protein. A heterologous nucleic acid sequence may be linked to a variant Cas9 protein (e.g., by genetic engineering) to generate a nucleotide sequence encoding a fusion variant polypeptide.

[0078] “Recombinant,” as used herein, means that a particular nucleic acid (DNA or RNA) is the product of various combinations of cloning, restriction, polymerase chain reaction (PCR) and/or ligation steps resulting in a construct having a structural coding or non-coding sequence distinguishable from endogenous nucleic acids found in natural systems. DNA sequences encoding polypeptides can be assembled from cDNA fragments or from a series of synthetic oligonucleotides, to provide a synthetic nucleic acid which is capable of being expressed from a recombinant transcriptional unit contained in a cell or in a cell-free transcription and translation system. Genomic DNA comprising the relevant sequences can also be used in the formation of a recombinant gene or transcriptional unit. Sequences of non-translated DNA may be present 5′ or 3′ from the open reading frame, where such sequences do not interfere with manipulation or expression of the coding regions, and may indeed act to modulate production of a desired product by various mechanisms (see “DNA regulatory sequences”, below). Alternatively, DNA sequences encoding RNA (e.g., Cas9 guide RNA) that is not translated may also be considered recombinant. Thus, e.g., the term “recombinant” nucleic acid refers to one which is not naturally occurring, e.g., is made by the artificial combination of two otherwise separated segments of sequence through human intervention. This artificial combination is often accomplished by either chemical synthesis means, or by the artificial manipulation of isolated segments of nucleic acids, e.g., by genetic engineering techniques. Such is usually done to replace a codon with a codon encoding the same amino acid, a conservative amino acid, or a non-conservative amino acid. Alternatively, it is performed to join together nucleic acid segments of desired functions to generate a desired combination of functions. This artificial combination is often accomplished by either chemical synthesis means, or by the artificial manipulation of isolated segments of nucleic acids, e.g., by genetic engineering techniques. When a recombinant polynucleotide encodes a polypeptide, the sequence of the encoded polypeptide can be naturally occurring (“wild type”) or can be a variant (e.g., a mutant) of the naturally occurring sequence. Thus, the term “recombinant” polypeptide does not necessarily refer to a polypeptide whose sequence does not naturally occur. Instead, a “recombinant” polypeptide is encoded by a recombinant DNA sequence, but the sequence of the polypeptide can be naturally occurring (“wild type”) or non-naturally occurring (e.g., a variant, a mutant, etc.). Thus, a “recombinant” polypeptide is the result of human intervention, but may be a naturally occurring amino acid sequence.

[0079] A “vector” or “expression vector” is a replicon, such as plasmid, phage, virus, or cosmid, to which another DNA segment, i.e. an “insert”, may be attached so as to bring about the replication of the attached segment in a cell.

[0080] An “expression cassette” comprises a DNA coding sequence operably linked to a promoter. “Operably linked” refers to a juxtaposition wherein the components so described are in a relationship permitting them to function in their intended manner. For instance, a promoter is operably linked to a coding sequence if the promoter affects its transcription or expression.

[0081] The terms “recombinant expression vector,” or “DNA construct” are used interchangeably herein to refer to a DNA molecule comprising a vector and one insert. Recombinant expression vectors are usually generated for the purpose of expressing and/or propagating the insert(s), or for the construction of other recombinant nucleotide sequences. The insert(s) may or may not be operably linked to a promoter sequence and may or may not be operably linked to DNA regulatory sequences.

[0082] A cell has been “genetically modified” or “transformed” or “transfected” by exogenous DNA, e.g. a recombinant expression vector, when such DNA has been introduced inside the cell. The presence of the exogenous DNA results in permanent or transient genetic change. The transforming DNA may or may not be integrated (covalently linked) into the genome of the cell. In prokaryotes, yeast, and mammalian cells for example, the transforming DNA may be maintained on an episomal element such as a plasmid. With respect to eukaryotic cells, a stably transformed cell is one in which the transforming DNA has become integrated into a chromosome so that it is inherited by daughter cells through chromosome replication. This stability is demonstrated by the ability of the eukaryotic cell to establish cell lines or clones that comprise a population of daughter cells containing the transforming DNA. A “clone” is a population of cells derived from a single cell or common ancestor by mitosis. A “cell line” is a clone of a primary cell that is capable of stable growth in vitro for many generations.

[0083] Suitable methods of genetic modification (also referred to as “transformation”) include e.g., viral or bacteriophage infection, transfection, conjugation, protoplast fusion, lipofection, electroporation, calcium phosphate precipitation, polyethyleneimine (PEI)-mediated transfection, DEAE-dextran mediated transfection, liposome-mediated transfection, particle gun technology, calcium phosphate precipitation, direct micro injection, nanoparticle-mediated nucleic acid delivery (see, e.g., Panyam et., al Adv Drug Deliv Rev. 2012 Sep. 13. pii: S0169-409X(12)00283-9. doi: 10.1016/j.addr.2012.09.023), and the like.

[0084] The choice of method of genetic modification is generally dependent on the type of cell being transformed and the circumstances under which the transformation is taking place (e.g., in vitro, ex vivo, or in vivo). A general discussion of these methods can be found in Ausubel, et al., Short Protocols in Molecular Biology, 3rd ed., Wiley & Sons, 1995.

[0085] A “target nucleic acid” as used herein is a polynucleotide (e.g., RNA, DNA) that includes a “target site” or “target sequence.” The terms “target site” or “target sequence” are used interchangeably herein to refer to a nucleic acid sequence present in a target nucleic acid to which a targeting segment of a Cas9 guide RNA will bind (see FIG. 8), provided sufficient conditions for binding exist; and/or to which a region (segment) of a PAMmer (e.g., a specificity segment and/or an orientation segment) will bind. For example, the target site (or target sequence) 5′-GAGCAUAUC-3′ within a target nucleic acid is targeted by (or is bound by, or hybridizes with, or is complementary to) the sequence 5′-GAUAUGCUC-3′. Suitable hybridization conditions include physiological conditions normally present in a cell. For a double stranded target nucleic acid, the strand of the target nucleic acid that is complementary to and hybridizes with the Cas9 guide RNA is referred to as the “complementary strand”; while the strand of the target nucleic acid that is complementary to the “complementary strand” (and is therefore not complementary to the Cas9 guide RNA) is referred to as the “noncomplementary strand” or “non-complementary strand”. In cases where the target nucleic acid is a single stranded target nucleic acid (e.g., single stranded DNA (ssDNA), single stranded RNA (ssRNA)), the Cas9 guide RNA is complementary to and hybridizes with single stranded target nucleic acid.

[0086] By “Cas9 protein” (as would be recognized by one of ordinary skill in the art) it is meant a protein that binds a Cas9 guide RNA and is targeted to a specific sequence (a target site) in a target nucleic acid (e.g., Cas9 proteins are characteristic of naturally existing type II CRISPR systems). A Cas9 protein is targeted at a target site by the Cas9 guide RNA to which it is bound. The Cas9 guide RNA comprises a sequence that is complementary to a target sequence within the target nucleic acid, thus targeting the bound Cas9 protein to a specific location within the target nucleic acid (the target sequence) (e.g., stabilizing the interaction of Cas9 with the target nucleic acid). In some cases, the Cas9 protein is a naturally-occurring protein (e.g, naturally occurs in bacterial and/or archaeal cells). In other cases, the Cas9 protein is not a naturally-occurring protein (e.g., the Cas9 protein can be a variant Cas9 protein, a chimeric protein as discussed below, and the like). Examples of suitable Cas9 proteins include, but are not limited to, those set forth in SEQ ID NOs: 1-259, and 795-1346. Naturally occurring Cas9 proteins bind a Cas9 guide RNA, are thereby directed to a specific sequence within a target nucleic acid (a target site), and cleave the target nucleic acid (e.g., cleave dsDNA to generate a double strand break, cleave ssDNA, cleave ssRNA, etc.). A chimeric Cas9 protein (a Cas9 fusion protein) is a fusion protein that is fused to a heterologous protein. The fusion partner can provide an activity, e.g., enzymatic activity (e.g., nuclease activity, activity for DNA and/or RNA methylation, activity for DNA and/or RNA cleavage, activity for histone acetylation, activity for histone methylation, activity for RNA modification, activity for RNA-binding, activity for RNA splicing etc.). In some cases a portion of the Cas9 protein (e.g., the RuvC domain and/or the HNH domain) exhibits reduced nuclease activity relative to the corresponding portion of a wild type Cas9 protein. In some cases, the Cas9 protein is enzymatically inactive. In some cases, the Cas9 protein is enzymatically inactive, but retains binding to a target nucleic acid when complexed with a Cas9 guide RNA.

[0087] By “cleavage” it is meant the breakage of the covalent backbone of a target nucleic acid molecule (e.g., RNA, DNA). Cleavage can be initiated by a variety of methods including, but not limited to, enzymatic or chemical hydrolysis of a phosphodiester bond. Both single-stranded cleavage and double-stranded cleavage are possible, and double-stranded cleavage can occur as a result of two distinct single-stranded cleavage events. In certain embodiments, a complex comprising a Cas9 guide RNA and a Cas9 protein is used for targeted cleavage of a single stranded target nucleic acid (e.g., ssRNA, ssDNA).

[0088] “Nuclease” and “endonuclease” are used interchangeably herein to mean an enzyme which possesses catalytic activity for nucleic acid cleavage (e.g., ribonuclease activity (ribonucleic acid cleavage), deoxyribonuclease activity (deoxyribonucleic acid cleavage), etc.).

[0089] By “cleavage domain” or “active domain” or “nuclease domain” of a nuclease it is meant the polypeptide sequence or domain within the nuclease which possesses the catalytic activity for nucleic acid cleavage. A cleavage domain can be contained in a single polypeptide chain or cleavage activity can result from the association of two (or more) polypeptides. A single nuclease domain may consist of more than one isolated stretch of amino acids within a given polypeptide (e.g., RuvCI, RuvCII, and RuvCIII of a Cas9 protein).

[0090] A nucleic acid molecule that binds to the Cas9 protein and targets the protein to a specific location within the target nucleic acid is referred to herein as a “Cas9 guide RNA”. A Cas9 guide RNA comprises two segments, a first segment (referred to herein as a “targeting segment”); and a second segment (referred to herein as a “protein-binding segment”). By “segment” it is meant a segment/section/region of a molecule, e.g., a contiguous stretch of nucleotides in a nucleic acid molecule. A segment can also mean a region/section of a complex such that a segment may comprise regions of more than one molecule. For example, in some cases the Cas9 guide RNA is one nucleic acid molecule (e.g., one RNA molecule) and the protein-binding segment therefore comprises a region of that one molecule. In other cases, the protein-binding segment (described below) of a Cas9 guide RNA includes regions of two separate molecules that are hybridized along a region of complementarity (forming a dsRNA duplex). The definition of “segment,” unless otherwise specifically defined in a particular context, is not limited to a specific number of total base pairs, is not limited to any particular number of base pairs from a given nucleic acid molecule, is not limited to a particular number of separate molecules within a complex, and may include regions of nucleic acid molecules that are of any total length and may or may not include regions with complementarity to other molecules.

[0091] In some embodiments, a subject nucleic acid (e.g., a Cas9 guide RNA, a nucleic acid comprising a nucleotide sequence encoding a Cas9 guide RNA; a nucleic acid encoding a Cas9 protein; a PAMmer, etc.) comprises a modification or sequence (e.g., an additional segment at the 5′ and/or 3′ end) that provides for an additional desirable feature (e.g., modified or regulated stability; subcellular targeting; tracking, e.g., a fluorescent label; a binding site for a protein or protein complex; etc.). Non-limiting examples include: a 5′ cap (e.g., a 7-methylguanylate cap (m7G)); a 3′ polyadenylated tail (i.e., a 3′ poly(A) tail); a ribozyme sequence (e.g. to allow for self-cleavage and release of a mature molecule in a regulated fashion); a riboswitch sequence (e.g., to allow for regulated stability and/or regulated accessibility by proteins and/or protein complexes); a stability control sequence; a sequence that forms a dsRNA duplex (i.e., a hairpin)); a modification or sequence that targets the nucleic acid to a subcellular location (e.g., nucleus, mitochondria, chloroplasts, and the like); a modification or sequence that provides for tracking (e.g., direct conjugation to a fluorescent molecule, conjugation to a moiety that facilitates fluorescent detection, a sequence that allows for fluorescent detection, etc.); a modification or sequence that provides a binding site for proteins (e.g., proteins that act on DNA and/or RNA, including transcriptional activators, transcriptional repressors, DNA methyltransferases, DNA demethylases, histone acetyltransferases, histone deacetylases, and the like); and combinations thereof.

[0092] A Cas9 guide RNA and a Cas9 protein form a complex (i.e., bind via non-covalent interactions). The guide RNA provides target specificity to the complex by comprising a nucleotide sequence that is complementary to a sequence of a target nucleic acid. The Cas9 protein of the complex provides the site-specific activity. In other words, the Cas9 protein is guided to a target nucleic acid sequence (e.g. a target sequence in a chromosomal nucleic acid; a target sequence in an extrachromosomal nucleic acid, e.g. an episomal nucleic acid, a minicircle, an ssRNA, an ssDNA, etc.; a target sequence in a mitochondrial nucleic acid; a target sequence in a chloroplast nucleic acid; a target sequence in a plasmid; etc.) by virtue of its association with the protein-binding segment of the Cas9 guide RNA.

[0093] In some embodiments, a Cas9 guide RNA comprises two separate nucleic acid molecules: an “activator” and a “targeter” (see below) and is referred to herein as a “Cas9 dual guide RNA”, a “double-molecule guide RNA”, a “dual guide RNA”, a “two-molecule guide RNA”, or simply “dgRNA.” In some embodiments, the Cas9 guide RNA has an activator and a targeter (as are present in a dual guide RNA), where the activator and targeter are covalently linked to one another (e.g., via intervening nucleotides) and is referred to herein as a “Cas9 single guide RNA”, a “single-molecule guide RNA,” or a “one-molecule guide RNA.” The term “Cas9 guide RNA” is inclusive, referring to both Cas9 dual guide RNAs (dgRNAs) and to Cas9 single guide RNAs (sgRNAs). In some cases, a Cas9 guide RNA is a DNA/RNA hybrid molecule.

[0094] A “host cell” or “target cell” as used herein, denotes an in vivo or in vitro eukaryotic cell, a prokaryotic cell (e.g., bacterial or archaeal cell), or a cell from a multicellular organism (e.g., a cell line) cultured as a unicellular entity, which eukaryotic or prokaryotic cells can be, or have been, used as recipients for a nucleic acid, and include the progeny of the original cell which has been transformed by the nucleic acid. It is understood that the progeny of a single cell may not necessarily be completely identical in morphology or in genomic or total DNA complement as the original parent, due to natural, accidental, or deliberate mutation. A “recombinant host cell” (also referred to as a “genetically modified host cell”) is a host cell into which has been introduced a heterologous nucleic acid, e.g., an expression vector. For example, a subject bacterial host cell is a genetically modified bacterial host cell by virtue of introduction into a suitable bacterial host cell of an exogenous nucleic acid (e.g., a plasmid or recombinant expression vector) and a subject eukaryotic host cell is a genetically modified eukaryotic host cell (e.g., a mammalian germ cell), by virtue of introduction into a suitable eukaryotic host cell of an exogenous nucleic acid.

[0095] The term “stem cell” is used herein to refer to a cell (e.g., plant stem cell, vertebrate stem cell) that has the ability both to self-renew and to generate a differentiated cell type (see Morrison et al. (1997) Cell 88:287-298). In the context of cell ontogeny, the adjective “differentiated”, or “differentiating” is a relative term. A “differentiated cell” is a cell that has progressed further down the developmental pathway than the cell it is being compared with. Thus, pluripotent stem cells (described below) can differentiate into lineage-restricted progenitor cells (e.g., mesodermal stem cells), which in turn can differentiate into cells that are further restricted (e.g., neuron progenitors), which can differentiate into end-stage cells (i.e., terminally differentiated cells, e.g., neurons, cardiomyocytes, etc.), which play a characteristic role in a certain tissue type, and may or may not retain the capacity to proliferate further. Stem cells may be characterized by both the presence of specific markers (e.g., proteins, RNAs, etc.) and the absence of specific markers. Stem cells may also be identified by functional assays both in vitro and in vivo, particularly assays relating to the ability of stem cells to give rise to multiple differentiated progeny.

[0096] Stem cells of interest include pluripotent stem cells (PSCs). The term “pluripotent stem cell” or “PSC” is used herein to mean a stem cell capable of producing all cell types of the organism. Therefore, a PSC can give rise to cells of all germ layers of the organism (e.g., the endoderm, mesoderm, and ectoderm of a vertebrate). Pluripotent cells are capable of forming teratomas and of contributing to ectoderm, mesoderm, or endoderm tissues in a living organism. Pluripotent stem cells of plants are capable of giving rise to all cell types of the plant (e.g., cells of the root, stem, leaves, etc.).

[0097] PSCs of animals can be derived in a number of different ways. For example, embryonic stem cells (ESCs) are derived from the inner cell mass of an embryo (Thomson et. al, Science. 1998 Nov. 6; 282(5391):1145-7) whereas induced pluripotent stem cells (iPSCs) are derived from somatic cells (Takahashi et. al, Cell. 2007 Nov. 30; 131(5):861-72; Takahashi et. al, Nat Protoc. 2007; 2(12):3081-9; Yu et. al, Science. 2007 Dec. 21; 318(5858):1917-20. Epub 2007 Nov. 20). Because the term PSC refers to pluripotent stem cells regardless of their derivation, the term PSC encompasses the terms ESC and iPSC, as well as the term embryonic germ stem cells (EGSC), which are another example of a PSC. PSCs may be in the form of an established cell line, they may be obtained directly from primary embryonic tissue, or they may be derived from a somatic cell. PSCs can be target cells of the methods described herein.

[0098] By “embryonic stem cell” (ESC) is meant a PSC that was isolated from an embryo, typically from the inner cell mass of the blastocyst. ESC lines are listed in the NIH Human Embryonic Stem Cell Registry, e.g. hESBGN-01, hESBGN-02, hESBGN-03, hESBGN-04 (BresaGen, Inc.); HES-1, HES-2, HES-3, HES-4, HES-5, HES-6 (ES Cell International); Miz-hES1 (MizMedi Hospital-Seoul National University); HSF-1, HSF-6 (University of California at San Francisco); and H1, H7, H9, H13, H14 (Wisconsin Alumni Research Foundation (WiCell Research Institute)). Stem cells of interest also include embryonic stem cells from other primates, such as Rhesus stem cells and marmoset stem cells. The stem cells may be obtained from any mammalian species, e.g. human, equine, bovine, porcine, canine, feline, rodent, e.g. mice, rats, hamster, primate, etc. (Thomson et al. (1998) Science 282:1145; Thomson et al. (1995) Proc. Natl. Acad. Sci USA 92:7844; Thomson et al. (1996) Biol. Reprod. 55:254; Shamblott et al., Proc. Natl. Acad. Sci. USA 95:13726, 1998). In culture, ESCs typically grow as flat colonies with large nucleo-cytoplasmic ratios, defined borders and prominent nucleoli. In addition, ESCs express SSEA-3, SSEA-4, TRA-1-60, TRA-1-81, and Alkaline Phosphatase, but not SSEA-1. Examples of methods of generating and characterizing ESCs may be found in, for example, U.S. Pat. No. 7,029,913, U.S. Pat. No. 5,843,780, and U.S. Pat. No. 6,200,806, the disclosures of which are incorporated herein by reference. Methods for proliferating hESCs in the undifferentiated form are described in WO 99/20741, WO 01/51616, and WO 03/020920.

[0099] By “embryonic germ stem cell” (EGSC) or “embryonic germ cell” or “EG cell” is meant a PSC that is derived from germ cells and/or germ cell progenitors, e.g. primordial germ cells, i.e. those that would become sperm and eggs. Embryonic germ cells (EG cells) are thought to have properties similar to embryonic stem cells as described above. Examples of methods of generating and characterizing EG cells may be found in, for example, U.S. Pat. No. 7,153,684; Matsui, Y., et al., (1992) Cell 70:841; Shamblott, M., et al. (2001) Proc. Natl. Acad. Sci. USA 98: 113; Shamblott, M., et al. (1998) Proc. Natl. Acad. Sci. USA, 95:13726; and Koshimizu, U., et al. (1996) Development, 122:1235, the disclosures of which are incorporated herein by reference.

[0100] By “induced pluripotent stem cell” or “iPSC” it is meant a PSC that is derived from a cell that is not a PSC (i.e., from a cell this is differentiated relative to a PSC). iPSCs can be derived from multiple different cell types, including terminally differentiated cells. iPSCs have an ES cell-like morphology, growing as flat colonies with large nucleo-cytoplasmic ratios, defined borders and prominent nuclei. In addition, iPSCs express one or more key pluripotency markers known by one of ordinary skill in the art, including but not limited to Alkaline Phosphatase, SSEA3, SSEA4, Sox2, Oct3/4, Nanog, TRA160, TRA181, TDGF 1, Dnmt3b, FoxD3, GDF3, Cyp26a1, TERT, and zfp42. Examples of methods of generating and characterizing iPSCs may be found in, for example, U.S. Patent Publication Nos. US20090047263, US20090068742, US20090191159, US20090227032, US20090246875, and US20090304646, the disclosures of which are incorporated herein by reference. Generally, to generate iPSCs, somatic cells are provided with reprogramming factors (e.g. Oct4, SOX2, KLF4, MYC, Nanog, Lin28, etc.) known in the art to reprogram the somatic cells to become pluripotent stem cells.

[0101] By “somatic cell” it is meant any cell in an organism that, in the absence of experimental manipulation, does not ordinarily give rise to all types of cells in an organism. In other words, somatic cells are cells that have differentiated sufficiently that they will not naturally generate cells of all three germ layers of the body, i.e. ectoderm, mesoderm and endoderm. For example, somatic cells would include both neurons and neural progenitors, the latter of which may be able to naturally give rise to all or some cell types of the central nervous system but cannot give rise to cells of the mesoderm or endoderm lineages.

[0102] By “mitotic cell” it is meant a cell undergoing mitosis. Mitosis is the process by which a eukaryotic cell separates the chromosomes in its nucleus into two identical sets in two separate nuclei. It is generally followed immediately by cytokinesis, which divides the nuclei, cytoplasm, organelles and cell membrane into two cells containing roughly equal shares of these cellular components.

[0103] By “post-mitotic cell” it is meant a cell that has exited from mitosis, i.e., it is “quiescent”, i.e. it is no longer undergoing divisions. This quiescent state may be temporary, i.e. reversible, or it may be permanent.

[0104] By “meiotic cell” it is meant a cell that is undergoing meiosis. Meiosis is the process by which a cell divides its nuclear material for the purpose of producing gametes or spores. Unlike mitosis, in meiosis, the chromosomes undergo a recombination step which shuffles genetic material between chromosomes. Additionally, the outcome of meiosis is four (genetically unique) haploid cells, as compared with the two (genetically identical) diploid cells produced from mitosis.

[0105] The terms “treatment”, “treating” and the like are used herein to generally mean obtaining a desired pharmacologic and/or physiologic effect. The effect may be prophylactic in terms of completely or partially preventing a disease or symptom thereof and/or may be therapeutic in terms of a partial or complete cure for a disease and/or adverse effect attributable to the disease. “Treatment” as used herein covers any treatment of a disease or symptom in a mammal, and includes: (a) preventing the disease or symptom from occurring in a subject which may be predisposed to acquiring the disease or symptom but has not yet been diagnosed as having it; (b) inhibiting the disease or symptom, i.e., arresting its development; or (c) relieving the disease, i.e., causing regression of the disease. The therapeutic agent may be administered before, during or after the onset of disease or injury. The treatment of ongoing disease, where the treatment stabilizes or reduces the undesirable clinical symptoms of the patient, is of particular interest. Such treatment is desirably performed prior to complete loss of function in the affected tissues. The subject therapy will desirably be administered during the symptomatic stage of the disease, and in some cases after the symptomatic stage of the disease.

[0106] The terms “individual,” “subject,” “host,” and “patient,” are used interchangeably herein and refer to any mammalian subject for whom diagnosis, treatment, or therapy is desired, particularly humans.

[0107] In some instances, a component (e.g., a nucleic acid component (e.g., a Cas9 guide RNA, a PAMmer, a quenched PAMmer, etc.); a protein component (e.g., a Cas9 protein, a variant Cas9 protein); and the like) includes a detectable label. The terms “label”, “detectable label”, or “label moiety” as used herein refer to any moiety that provides for signal detection and may vary widely depending on the particular nature of the assay to detect the label. Label moieties (e.g., quantum dots, tethered fluorescent proteins, etc.) of interest include both directly detectable labels (direct labels; e.g., a fluorescent label) and indirectly detectable labels (indirect labels; e.g., a binding pair member).

[0108] A fluorescent label can be any fluorescent label (e.g., a fluorescent dye (e.g., fluorescein, Texas red, rhodamine, ALEXAFLUOR® labels, and the like), a fluorescent protein (e.g., GFP, EGFP, YFP, RFP, CFP, YFP, cherry, tomato, tangerine, and any fluorescent derivative thereof), etc.). Suitable detectable (directly or indirectly) label moieties, for use in a composition or method of the present disclosure, include any moiety that is detectable by spectroscopic, photochemical, biochemical, immunochemical, electrical, optical, chemical, or other means. For example, suitable indirect labels include biotin (a binding pair member), which can be bound by streptavidin (which can itself be directly or indirectly labeled). Labels can also include: a radiolabel (a direct label) (e.g., ³H, ¹²⁵I, ³⁵S, ¹⁴C, or ³²P); an enzyme (an indirect label) (e.g., peroxidase, alkaline phosphatase, galactosidase, luciferase, glucose oxidase, and the like); a fluorescent protein (a direct label) (e.g., green fluorescent protein, red fluorescent protein, yellow fluorescent protein, and any convenient derivatives thereof); a metal label (a direct label); a colorimetric label; a binding pair member; and the like. By “partner of a binding pair” or “binding pair member” is meant one of a first and a second moiety, wherein the first and the second moiety have a specific binding affinity for each other. Suitable binding pairs include, but are not limited to: antigen/antibodies (for example, digoxigenin/anti-digoxigenin, dinitrophenyl (DNP)/anti-DNP, dansyl-X-anti-dansyl, fluorescein/anti-fluorescein, lucifer yellow/anti-lucifer yellow, and rhodamine anti-rhodamine), biotin/avidin (or biotin/streptavidin) and calmodulin binding protein (CBP)/calmodulin. Any binding pair member can be suitable for use as an indirectly detectable label moiety.

[0109] Any given component, or combination of components can be unlabeled, or can be detectably labeled with a label moiety. In some cases, when two or more components are labeled, they can be labeled with label moieties that are distinguishable from one another.

[0110] General methods in molecular and cellular biochemistry can be found in such standard textbooks as Molecular Cloning: A Laboratory Manual, 3rd Ed. (Sambrook et al., HaRBor Laboratory Press 2001); Short Protocols in Molecular Biology, 4th Ed. (Ausubel et al. eds., John Wiley & Sons 1999); Protein Methods (Bollag et al., John Wiley & Sons 1996); Nonviral Vectors for Gene Therapy (Wagner et al. eds., Academic Press 1999); Viral Vectors (Kaplift & Loewy eds., Academic Press 1995); Immunology Methods Manual (I. Lefkovits ed., Academic Press 1997); and Cell and Tissue Culture: Laboratory Procedures in Biotechnology (Doyle & Griffiths, John Wiley & Sons 1998), the disclosures of which are incorporated herein by reference.

[0111] The term “biological sample” encompasses a clinical sample, and also includes tissue obtained by surgical resection, tissue obtained by biopsy, cells in culture, cell supernatants, cell lysates, tissue samples, organs, bone marrow, blood, plasma, serum, aspirate, and the like. A “biological sample” includes a sample comprising target cells and/or normal control cells, or is suspected of comprising such cells. The definition includes biological fluids derived therefrom (e.g., cancerous cell, infected cell, etc.), e.g., a sample comprising polynucleotides and/or polypeptides that is obtained from such cells (e.g., a cell lysate or other cell extract comprising polynucleotides and/or polypeptides). A biological sample comprising an inflicted cell (e.g., cancer cell, an infected cell, etc.) from a patient can also include non-inflicted cells.

[0112] Before the present invention is further described, it is to be understood that this invention is not limited to particular embodiments described, as such may, of course, vary. It is also to be understood that the terminology used herein is for the purpose of describing particular embodiments only, and is not intended to be limiting, since the scope of the present invention will be limited only by the appended claims.

[0113] Where a range of values is provided, it is understood that each intervening value, to the tenth of the unit of the lower limit unless the context clearly dictates otherwise, between the upper and lower limit of that range and any other stated or intervening value in that stated range, is encompassed within the invention. The upper and lower limits of these smaller ranges may independently be included in the smaller ranges, and are also encompassed within the invention, subject to any specifically excluded limit in the stated range. Where the stated range includes one or both of the limits, ranges excluding either or both of those included limits are also included in the invention.

[0114] Certain ranges are presented herein with numerical values being preceded by the term “about.” The term “about” is used herein to provide literal support for the exact number that it precedes, as well as a number that is near to or approximately the number that the term precedes. In determining whether a number is near to or approximately a specifically recited number, the near or approximating unrecited number may be a number which, in the context in which it is presented, provides the substantial equivalent of the specifically recited number.

[0115] Unless defined otherwise, all technical and scientific terms used herein have the same meaning as commonly understood by one of ordinary skill in the art to which this invention belongs. Although any methods and materials similar or equivalent to those described herein can also be used in the practice or testing of the present invention, the preferred methods and materials are now described. All publications mentioned herein are incorporated herein by reference to disclose and describe the methods and/or materials in connection with which the publications are cited.

[0116] All publications and patents cited in this specification are herein incorporated by reference as if each individual publication or patent were specifically and individually indicated to be incorporated by reference and are incorporated herein by reference to disclose and describe the methods and/or materials in connection with which the publications are cited. The citation of any publication is for its disclosure prior to the filing date and should not be construed as an admission that the present invention is not entitled to antedate such publication by virtue of prior invention. Further, the dates of publication provided may be different from the actual publication dates which may need to be independently confirmed.

[0117] It is noted that as used herein and in the appended claims, the singular forms “a,” “an,” and “the” include plural referents unless the context clearly dictates otherwise. Thus, for example, reference to “a polynucleotide” includes a plurality of such polynucleotides and reference to “the polypeptide” includes reference to one or more polypeptides and equivalents thereof known to those skilled in the art, and so forth. It is further noted that the claims may be drafted to exclude any optional element. As such, this statement is intended to serve as antecedent basis for use of such exclusive terminology as “solely,” “only” and the like in connection with the recitation of claim elements, or use of a “negative” limitation.

[0118] It is appreciated that certain features of the invention, which are, for clarity, described in the context of separate embodiments, may also be provided in combination in a single embodiment. Conversely, various features of the invention, which are, for brevity, described in the context of a single embodiment, may also be provided separately or in any suitable sub-combination. All combinations of the embodiments pertaining to the invention are specifically embraced by the present invention and are disclosed herein just as if each and every combination was individually and explicitly disclosed. In addition, all sub-combinations of the various embodiments and elements thereof are also specifically embraced by the present invention and are disclosed herein just as if each and every such sub-combination was individually and explicitly disclosed herein.

[0119] The publications discussed herein are provided solely for their disclosure prior to the filing date of the present application. Nothing herein is to be construed as an admission that the present invention is not entitled to antedate such publication by virtue of prior invention. Further, the dates of publication provided may be different from the actual publication dates which may need to be independently confirmed.

### DETAILED DESCRIPTION

[0120] The present disclosure provides compositions and methods for labeling a single stranded target nucleic acid. In some cases, a composition of the present disclosure includes a Cas9 protein, a Cas9 guide RNA, and a quenched PAMmer. A subject quenched PAMmer is a single stranded oligonucleotide having (i) a protospacer adjacent motif (PAM) sequence; (ii) a detectable label; (iii) a quencher moiety that quenches the detectable label; and (iv) at least one of: a specificity segment positioned 5′ of the PAM sequence, and an orientation segment positioned 3′ of the PAM sequence. In the subject methods, the Cas9 protein cleaves the quenched PAMmer at a cleavage site positioned between the detectable label and the quencher moiety to produce: (a) a first cleavage product that is hybridized with the target nucleic acid and comprises the detectable label; and (b) a second cleavage product that is not hybridized with the target nucleic acid and comprises the quencher moiety. In some cases, the quenched PAMmer comprises an orientation segment and a specificity segment.

[0121] The subject methods lead to cleavage of the quenched PAMmer such that one cleavage product (the first cleavage product) hybridizes to the target nucleic acid (e.g., remains hybridized to the target nucleic acid) and comprises the label (e.g., retains the detectable label) while a second cleavage product comprising the quencher moiety is not hybridized with the target nucleic acid and thus moves out of proximity of the detectable label (e.g., via diffusion), thus rendering the label detectable.

[0122] Throughout the description below, when referring to the components (e.g., a PAMmer, e.g., a quenched PAMmer; a Cas9 guide RNA; a Cas9 protein; etc.) of subject compositions and methods, terms describing the components can also refer to nucleic acids encoding the components because components of the disclosure can be provided as nucleic acids encoding the component. For example, when a composition or method includes a Cas9 protein, it is understood that the Cas9 can be provided as the actual polypeptide or as a nucleic acid (DNA or RNA) encoding the same. Likewise, when a composition or method includes a Cas9 guide RNA, it is understood that the Cas9 guide RNA can be provided as RNA or as a nucleic acid (DNA) encoding the same. For example, in some cases a Cas9 guide RNA is a modified nucleic acid, in some cases a Cas9 guide RNA is a DNA/RNA hybrid molecule, and in some cases a Cas9 guide RNA is RNA, in which case the guide RNA can be provided as RNA or as a DNA (e.g., plasmid) encoding the Cas9 guide RNA.

[0123] Compositions and Components

[0124] The present disclosure provides compositions for labeling a single stranded target nucleic acid. A subject composition includes a quenched PAMmer and at least one of: (i) a Cas9 guide RNA (e.g., a dual-guide RNA, a single-guide RNA, an RNA/DNA hybrid guide RNA, etc.), and (ii) a Cas9 protein. FIG. 8 presents schematic depictions of example embodiments of the present disclosure.

[0125] Quenched PAMmer

[0126] The present disclosure provides a quenched PAMmer. A subject “quenched PAMmer” is a PAMmer (described in more detail below) that has a detectable label and a quencher moiety that quenches the signal from the detectable label. Thus, a “quenched PAMmer” is a single stranded oligonucleotide (e.g., DNA, RNA, a modified nucleic acid (described below), etc.) that hybridizes to a single stranded target nucleic acid (thus converting the single stranded target nucleic acid into a double stranded target nucleic acid at a desired position), and provides a protospacer adjacent motif (PAM) sequence. Thus, when describing the features of a PAMmer throughout, the same description holds true for a quenched PAMmer, with the exception that a quenched PAMmer includes a detectable label and a quencher moiety. Thus, the term PAMmer encompasses the term “quenched PAMmer.”

[0127] A PAMmer includes a PAM sequence and at least one of: an orientation segment (which is positioned 3′ of the PAM sequence), and a specificity segment (which is positioned 5′ of the PAM sequence). A specificity segment includes a nucleotide sequence that is complementary to a first target nucleotide sequence in a target nucleic acid (i.e., the sequence that is targeted by the specificity segment), where the first target nucleotide sequence overlaps (in some cases 100%) with the sequence targeted by the targeting segment of the Cas9 guide RNA. In other words, the specificity segment is complementary with (and hybridizes to) the target site of the target nucleic acid (see FIGS. 8A-D).

[0128] An orientation segment has a nucleotide sequence that is complementary to a second target nucleotide sequence in a target nucleic acid (i.e., the sequence that is targeted by the orientation segment) (e.g., see FIG. 8). In some cases, a subject PAMmer includes a PAM sequence and an orientation segment, but does not include a specificity segment. In some cases, a subject PAMmer includes a PAM sequence and a specificity segment, but does not include an orientation segment.

[0129] In some cases, a PAMmer having a specificity segment is referred to herein as a “5′ extended PAMmer.” The term “5′ extended PAMmer” refers to a situation in which a PAMmer includes nucleotides 5′ of the PAM sequence. The term “5′ extended PAMmer” encompasses a PAMmer having a specificity segment, but also encompasses a PAMmer that has nucleotides 5′ of the PAM sequence that do not constitute a specificity segment. A stretch of one or more nucleotides 5′ of the PAM sequence that do not constitute a specificity segment is herein referred to as a “5′ extension arm”. Thus, in some cases, the nucleotides that are 5′ of the PAM sequence constitute a specificity segment (i.e., the nucleotides hybridize to the target nucleic acid) (see below for a more detailed discussion regarding a specificity segment), and in some cases, the nucleotide(s) that are 5′ of the PAM sequence constitute a 5′ extension arm (i.e., do not constitute a specificity segment, do not hybridize with the target nucleic acid). In some cases, a PAMmer (e.g., a quenched PAMmer) has a 5′ extension (and the quenched PAMmer is therefore a 5′ extended PAMmer), having both a 5′ extension arm and a specificity segment (e.g, a 5′ extension arm can be positioned 5′ of a specificity segment) (e.g., see FIG. 8G). In some cases, a subject PAMmer (e.g., a quenched PAMmer) has a 3′ extension arm (one or more nucleotides that are 3′ of the PAM sequence that do not hybridize with the target nucleic acid) (e.g., see FIG. I). Like a 5′ extension arm, a subject PAMmer (e.g., quenched PAMmer) can have both an orientation segment and a 3′ extension arm (e.g., where the 3′ extension arm is 3′ of the orientation segment).

[0130] In some cases, a subject PAMmer includes a PAM sequence, an orientation segment, and a specificity segment. The number of nucleotides (nt) present in the PAMmer between a specificity segment and an orientation segment can depend on a number of factors that include, but are not limited to: the length of the PAM sequence (which is present between the specificity segment and the orientation segment); the number of nucleotides present between the target site and the orientation site of the target nucleic acid; the presence or absence of additional sequences (e.g., aptamers, protein binding sequences, linker nucleotides, stability sequences, etc.) between the specificity segment and the orientation segment; etc. In some embodiments, the number of nucleotides (nt) present in the PAMmer between a specificity segment and an orientation segment is in a range of from 2 nt to 100 nt (e.g., 2 nt to 90 nt, 2 nt to 80 nt, 2 nt to 70 nt, 2 nt to 60 nt, 2 nt to 50 nt, 2 nt to 40 nt, 2 nt to 30 nt, 2 nt to 25 nt, 2 nt to 20 nt, 2 nt to 15 nt, or 2 nt to 10 nt). In some embodiments, the number of nucleotides (nt) present in the PAMmer between the specificity segment and the orientation segment is 100 nt or less (e.g., 90 nt or less, 80 nt or less, 70 nt or less, 60 nt or less, 50 nt or less, 40 nt or less, 30 nt or less, 25 nt or less, 25 nt or less, 20 nt or less, 15 nt or less, or 10 nt or less).

[0131] In some embodiments, the PAM sequence is immediately adjacent to the orientation segment, immediately adjacent to the specificity segment, and/or immediately adjacent to both the orientation segment and the specificity segment. In some embodiments, the number of nucleotides (nt) present in the PAMmer between the PAM sequence and the specificity segment of the PAMmer is in a range of from 0 nt to 10 nt (e.g., 0 nt to 9 nt, 0 nt to 8 nt, 0 nt to 7 nt, 0 nt to 6 nt, 0 nt to 5 nt, 0 nt to 4 nt, 0 nt to 3 nt, 1 nt to 9 nt, 1 nt to 8 nt, 1 nt to 7 nt, 1 nt to 6 nt, 1 nt to 5 nt, 1 nt to 4 nt, 1 nt to 3 nt, 2 nt to 9 nt, 2 nt to 8 nt, 2 nt to 7 nt, 2 nt to 6 nt, 2 nt to 5 nt, 2 nt to 4 nt, or 2 nt to 3 nt). In some embodiments, 10 or less nt (e.g., 9 or less nt, 8 or less nt, 7 or less nt, 6 or less nt, 5 or less nt, 4 or less nt, 3 or less nt, 2 or less nt, 1 or less nt, or no nt) are present in the PAMmer between the PAM sequence and the specificity segment. In some embodiments, the number of nucleotides (nt) present in the PAMmer between the PAM sequence and the orientation segment of the PAMmer is in a range of from 0 nt to 10 nt (e.g., 0 nt to 9 nt, 0 nt to 8 nt, 0 nt to 7 nt, 0 nt to 6 nt, 0 nt to 5 nt, 0 nt to 4 nt, 0 nt to 3 nt, 1 nt to 9 nt, 1 nt to 8 nt, 1 nt to 7 nt, 1 nt to 6 nt, 1 nt to 5 nt, 1 nt to 4 nt, 1 nt to 3 nt, 2 nt to 9 nt, 2 nt to 8 nt, 2 nt to 7 nt, 2 nt to 6 nt, 2 nt to 5 nt, 2 nt to 4 nt, or 2 nt to 3 nt). In some embodiments, 10 or less nt (e.g., 9 or less nt, 8 or less nt, 7 or less nt, 6 or less nt, 5 or less nt, 4 or less nt, 3 or less nt, 2 or less nt, 1 or less nt, or no nt) are present in the PAMmer between the PAM sequence and the orientation segment.

[0132] In some embodiments, a PAMmer has a length (e.g., the PAM sequence and the orientation segment have a combined length) in a range of from 2 nt to 100 nt (e.g., 2 nt to 70 nt, 2 nt to 50 nt, 2 nt to 45 nt, 2 nt to 40 nt, 2 nt to 35 nt, 2 nt to 30 nt, 2 nt to 25 nt, 2 nt to 20 nt, 2 nt to 10 nt, 2 nt to 5 nt, 3 nt to 70 nt, 3 nt to 50 nt, 3 nt to 45 nt, 3 nt to 40 nt, 3 nt to 35 nt, 3 nt to 30 nt, 3 nt to 25 nt, 3 nt to 20 nt, 3 nt to 10 nt, 3 nt to 5 nt, 5 nt to 70 nt, 5 nt to 50 nt, 5 nt to 45 nt, 5 nt to 40 nt, 5 nt to 35 nt, 5 nt to 30 nt, 5 nt to 25 nt, 5 nt to 20 nt, 10 nt to 70 nt, 10 nt to 50 nt, 10 nt to 45 nt, 10 nt to 40 nt, 10 nt to 35 nt, 10 nt to 30 nt, 10 nt to 25 nt, 10 nt to 20 nt, 10 nt to 15 nt, 15 nt to 70 nt, 15 nt to 50 nt, 15 nt to 45 nt, 15 nt to 40 nt, 15 nt to 35 nt, 15 nt to 30 nt, 15 nt to 25 nt, or 15 nt to 20 nt).

[0133] In some cases, a PAMmer is a DNA molecule. In some cases, a PAMmer is an RNA molecule.

[0134] In some cases, a PAMmer is a hybrid DNA/RNA molecule (e.g., in some cases, at least the PAM sequence of the PAMmer is DNA). In some cases the PAMmer has one or more modified nucleic acids (described in more detail below with respect to nucleic acid modifications). In some embodiments, a subject PAMmer has one or more nucleotides that are 2′-O-Methyl modified nucleotides. In some embodiments, a subject PAMmer has one or more 2′ Fluoro modified nucleotides. In some embodiments, a subject PAMmer has one or more LNA bases. In some embodiments, a subject PAMmer has one or more nucleotides that are linked by a phosphorothioate bond (i.e., the subject nucleic acid has one or more phosphorothioate linkages). In some embodiments, a subject PAMmer has a 5′ cap (e.g., a 7-methylguanylate cap (m7G)). In some embodiments, a subject PAMmer has a combination of modified nucleotides. For example, a subject PAMmer can have a 5′ cap (e.g., a 7-methylguanylate cap (m7G)) in addition to having one or more nucleotides with other modifications (e.g., a 2′-O-Methyl nucleotide and/or a 2′ Fluoro modified nucleotide and/or a LNA base and/or a phosphorothioate linkage). See FIG. 17 for working examples that utilize PAMmers having one or more modified nucleotides.

[0135] As mentioned above, a quenched PAMmer includes a detectable label and a quencher moiety, where the quencher moiety quenches the detectable label (i.e., the quencher moiety quenches the signal of a detectable label such that the signal from the detectable label is reduced (quenched) when the label is in proximity to the quencher moiety).

[0136] The detectable label and the quencher moiety are positioned on either side of the Cas9 cleavage site (the site at which the Cas9 protein cleaves the PAMmer, e.g., the RuvC cleavage site) such that after cleavage, the detectable label and the quencher moiety will be attached to (e.g., conjugated to) separate resulting cleavage fragments (see, e.g., FIG. 29 for Cas9 cleavage site of a PAMmer). The detectable label and the quencher moiety each can be located (positioned) at any convenient location (position) of the quenched PAMmer (For non-limiting illustrative examples, see FIG. 8G, FIG. 8H, FIG. 8I, and FIG. 30) as long as the Cas9 protein cleaves between the detectable label and the quencher moiety (or as long as the one fragment resulting from Cas9 cleavage includes a detectable label that is not quenched because there is no functional quencher moiety on that same fragment), and as long as the quencher moiety quenches the signal from the detectable label prior to cleavage.

[0137] A quencher moiety can quench a signal from the detectable label (prior to cleavage of the quenched PAMmer) to various degrees. In some cases, a quencher moiety quenches the signal from the detectable label when the signal detected in the presence of the quencher moiety (prior to cleavage of the quenched PAMmer) is 95% or less of the signal detected in the absence of the quencher moiety (after cleavage of the quenched PAMmer). For example, in some cases, the signal detected in the presence of the quencher moiety (prior to cleavage of the quenched PAMmer) can be 90% or less, 80% or less, 70% or less, 60% or less, 50% or less, 40% or less, 30% or less, 20% or less, 15% or less, 10% or less, or 5% or less of the signal detected in the absence of the quencher moiety (after cleavage of the quenched PAMmer). In some cases, no signal (e.g., above background) is detected in the presence of the quencher moiety (prior to cleavage of the quenched PAMmer).

[0138] In some cases, the signal detected in the absence of the quencher moiety (after cleavage of the quenched PAMmer) is at least 1.2 fold greater (e.g., at least 1.3fold, at least 1.5fold, at least 1.7 fold, at least 2 fold, at least 2.5 fold, at least 3 fold, at least 3.5 fold, at least 4 fold, at least 5 fold, at least 7 fold, at least 10 fold, at least 20 fold, or at least 50 fold greater) than the signal detected in the presence of the quencher moiety (prior to cleavage of the quenched PAMmer).

[0139] For example, the detectable label can be positioned at the 5′ end of the quenched PAMmer, the 3′ end of the quenched PAMmer, within a 5′ extension arm, within a specificity segment, within a PAM sequence, within an orientation segment, within a 3′ extension arm, or at the boundary of any of the above regions (e.g., at the boundary of a 5′ extension arm and a specificity segment, at the boundary of a 3′ extension arm and an orientation segment, at the boundary of a specificity segment and a PAM sequence, at the boundary of an orientation segment and a PAM sequence, etc.). For example, the quencher moiety can be positioned at the 5′ end of the quenched PAMmer, the 3′ end of the quenched PAMmer, within a 5′ extension arm, within a specificity segment, within a PAM sequence, within an orientation segment, within a 3′ extension arm, or at the boundary of any of the above regions (e.g., at the boundary of a 5′extension arm and a specificity segment, at the boundary of a 3′extension arm and an orientation segment, at the boundary of a specificity segment and a PAM sequence, at the boundary of an orientation segment and a PAM sequence, etc.).

[0140] In some cases, the detectable label is positioned 5′ of the cleavage site and the quencher moiety is positioned 3′ of the cleavage site. In other cases, the detectable label is positioned 3′ of the cleavage site and the quencher moiety is positioned 5′ of the cleavage site. In some cases, the detectable label is positioned 3′ of the cleavage site, the quencher moiety is positioned 5′ of the cleavage site, and the quenched PAMmer comprises an orientation segment. In some cases, the detectable label is positioned 5′ of the cleavage site, the quencher moiety is positioned 3′ of the cleavage site, and the quenched PAMmer comprises a specificity segment. In some cases, the detectable label and the quencher moiety are both positioned 5′ of the PAM sequence. In some cases, the detectable label is positioned 3′ of the PAM sequence and the quencher moiety is positioned 5′ of the PAM sequence. In some cases, the detectable label is positioned 5′ of the PAM sequence and the quencher moiety is positioned 3′ of the PAM sequence. In some cases, the quenched PAMmer comprises a 5′ extension arm, positioned 5′ of the PAM sequence, wherein the 5′ extension arm comprises: (a) a nucleotide sequence that does not hybridize with the target nucleic acid, and (b) the quencher moiety. In some cases, the quenched PAMmer comprises a 3′ extension arm, positioned 3′ of the PAM sequence, wherein the 3′ extension arm comprises: (a) a nucleotide sequence that does not hybridize with the target nucleic acid, and (b) the quencher moiety.

[0141] In some cases, a quenched PAMmer includes, in order from 5′ to 3′, a quencher moiety, a detectable label, and a PAM sequence. In some cases, a quenched PAMmer includes, in order from 5′ to 3′, a quencher moiety, a PAM sequence, and a detectable label. In some cases, a quenched PAMmer includes, in order from 5′ to 3′, a detectable label, a quencher moiety, and a PAM sequence. In some cases, a quenched PAMmer includes, in order from 5′ to 3′, a detectable label, a PAM sequence, and a quencher moiety.

[0142] A detectable label and/or a quencher moiety can be attached to a quenched PAMmer or to a PAMmer (to produce a quenched PAMmer) in any convenient way. For example, a detectable label and/or a quencher moiety can be conjugated to a nucleotide (a particular nucleotide position) of a quenched PAMmer (or of a PAMmer to produce a quenched PAMmer). As another example, a detectable label and/or a quencher moiety can be integrated (e.g., at a particular nucleotide position) into a quenched PAMmer (or into a PAMmer to produce a quenched PAMmer) (e.g., see FIG. 30A-C).

[0143] A detectable label and/or a quencher moiety can be attached to a quenched PAMmer or to a PAMmer (to produce a quenched PAMmer) using any convenient method. For example, a detectable label and/or a quencher moiety can be attached using an amino dT nucleotide and an NHS-ester containing dye (e.g., an NHS-ester containing detectable label or an NHS-ester containing quencher moiety). As another example, a detectable label and/or a quencher moiety can be integrated into a quenched PAMmer or into a PAMmer (to produce a quenched PAMmer) in such a way that the detectable label and/or quencher moiety takes the place of a nucleotide (an “internal” detectable label and/or an “internal” quencher moiety) (e.g., see FIG. 30A-C).

[0144] In some cases, there are 50 or less nucleotides (e.g., 40 or less, 35 or less, 30 or less, 25 or less, 20 or less, 15 or less, 12 or less, 10 or less, 9 or less, 8 or less, 7 or less, 6 or less, 5 or less, 4 or less, 3 or less, 2 or less, or no nucleotides) between the detectable label (e.g., the nucleotide to which the detectable label is conjugated) and the quencher moiety (e.g., the nucleotide to which the quencher moiety is conjugated).

[0145] In some cases, the number of nucleotides between the detectable label (e.g., the nucleotide to which the detectable label is conjugated) and the quencher moiety (e.g., the nucleotide to which the quencher moiety is conjugated) is in a range of from 1 to 50 nucleotides (nt) (e.g., from 1 to 45 nt, from 1 to 40 nt, from 1 to 35 nt, from 1 to 30 nt, from 1 to 25 nt, from 1 to 20 nt, from 1 to 15 nt, from 1 to 10 nt, from 1 to 8 nt, from 1 to 6 nt, from 1 to 4 nt, from 2 to 50 nt, from 2 to 45 nt, from 2 to 40 nt, from 2 to 35 nt, from 2 to 30 nt, from 2 to 25 nt, from 2 to 20 nt, from 2 to 15 nt, from 2 to 10 nt, from 2 to 8 nt, from 2 to 6 nt, from 2 to 4 nt, from 3 to 50 nt, from 3 to 45 nt, from 3 to 40 nt, from 3 to 35 nt, from 3 to 30 nt, from 3 to 25 nt, from 3 to 20 nt, from 3 to 15 nt, from 3 to 10 nt, from 3 to 8 nt, from 3 to 6 nt, from 3 to 4 nt, from 4 to 50 nt, from 4 to 45 nt, from 4 to 40 nt, from 4 to 35 nt, from 4 to 30 nt, from 4 to 25 nt, from 4 to 20 nt, from 4 to 15 nt, from 4 to 10 nt, from 4 to 8 nt, from 4 to 6 nt, from 5 to 50 nt, from 5 to 45 nt, from 5 to 40 nt, from 5 to 35 nt, from 5 to 30 nt, from 5 to 25 nt, from 5 to 20 nt, from 5 to 15 nt, from 5 to 10 nt, from 5 to 8 nt, from 5 to 6 nt, from 6 to 50 nt, from 6 to 45 nt, from 6 to 40 nt, from 6 to 35 nt, from 6 to 30 nt, from 6 to 25 nt, from 6 to 20 nt, from 6 to 15 nt, from 6 to 10 nt, or from 6 to 8 nt).

[0146] In some cases, the number of nucleotides between the detectable label (e.g., the nucleotide to which the detectable label is conjugated) and the quencher moiety (e.g., the nucleotide to which the quencher moiety is conjugated) is in a range of from 2 to 10 nucleotides (nt) (e.g., from 2 to 8 nt, from 2 to 6 nt, from 2 to 5 nt, from 3 to 10 nt, from 3 to 8 nt, from 3 to 6 nt, from 3 to 5 nt, from 4 to 10 nt, from 4 to 8 nt, from 4 to 6 nt, from 5 to 10 nt, from 5 to 8 nt, or from 5 to 6 nt).

[0147] In some cases, the number of nucleotides between the detectable label (e.g., the nucleotide to which the detectable label is conjugated) and the quencher moiety (e.g., the nucleotide to which the quencher moiety is conjugated) is in a range of from 3 to 6 nucleotides (nt) (e.g., from 3 to 5 nt). In some cases, there are 4 nucleotides between the detectable label (e.g., the nucleotide to which the detectable label is conjugated) and the quencher moiety (e.g., the nucleotide to which the quencher moiety is conjugated).

[0148] In some cases, there are no nucleotides between the detectable label and the quencher moiety, e.g., in such cases the detectable label and the quencher moiety will still be positioned such that cleavage by a Cas9 protein separates the two. As such, in some cases, the number of nucleotides between the detectable label (e.g., the nucleotide to which the detectable label is conjugated) and the quencher moiety (e.g., the nucleotide to which the quencher moiety is conjugated) is in a range of from 0 to 50 nucleotides (nt) (e.g., from 0 to 45 nt, from 0 to 40 nt, from 0 to 35 nt, from 0 to 30 nt, from 0 to 25 nt, from 0 to 20 nt, from 0 to 15 nt, from 0 to 10 nt, from 0 to 8 nt, from 0 to 6 nt, from 0 to 4 nt, from 1 to 45 nt, from 1 to 40 nt, from 1 to 35 nt, from 1 to 30 nt, from 1 to 25 nt, from 1 to 20 nt, from 1 to 15 nt, from 1 to 10 nt, from 1 to 8 nt, from 1 to 6 nt, from 1 to 4 nt, from 2 to 50 nt, from 2 to 45 nt, from 2 to 40 nt, from 2 to 35 nt, from 2 to 30 nt, from 2 to 25 nt, from 2 to 20 nt, from 2 to 15 nt, from 2 to 10 nt, from 2 to 8 nt, from 2 to 6 nt, from 2 to 4 nt, from 3 to 50 nt, from 3 to 45 nt, from 3 to 40 nt, from 3 to 35 nt, from 3 to 30 nt, from 3 to 25 nt, from 3 to 20 nt, from 3 to 15 nt, from 3 to 10 nt, from 3 to 8 nt, from 3 to 6 nt, from 3 to 4 nt, from 4 to 50 nt, from 4 to 45 nt, from 4 to 40 nt, from 4 to 35 nt, from 4 to 30 nt, from 4 to 25 nt, from 4 to 20 nt, from 4 to 15 nt, from 4 to 10 nt, from 4 to 8 nt, from 4 to 6 nt, from 5 to 50 nt, from 5 to 45 nt, from 5 to 40 nt, from 5 to 35 nt, from 5 to 30 nt, from 5 to 25 nt, from 5 to 20 nt, from 5 to 15 nt, from 5 to 10 nt, from 5 to 8 nt, from 5 to 6 nt, from 6 to 50 nt, from 6 to 45 nt, from 6 to 40 nt, from 6 to 35 nt, from 6 to 30 nt, from 6 to 25 nt, from 6 to 20 nt, from 6 to 15 nt, from 6 to 10 nt, or from 6 to 8 nt).

[0149] In some cases, the detectable label is a fluorescent label. In some such cases, the quencher moiety quenches the signal (the light signal) from the fluorescent label (e.g., by absorbing energy in the emission spectra of the label). Thus, when the quencher moiety is not in proximity with the detectable label, the emission (the signal) from the fluorescent label is detectable because the signal is not absorbed by the quencher moiety. Any convenient donor acceptor pair (detectable label/quencher moiety pair) can be used and many suitable pairs are known in the art.

[0150] In some cases the quencher moiety absorbs energy from the detectable label and then emits a signal (e.g., light at a different wavelength). Thus, in some cases, the quencher moiety is itself a detectable label (e.g., a detectable label can be 6-carboxyfluorescein while the quencher moiety can be 6-carboxy-tetramethylrhodamine). In some cases, a quencher moiety is a dark quencher. A dark quencher can absorb excitation energy and dissipate the energy in a different way (e.g., as heat). Thus, a dark quencher has minimal to no fluorescence of its own (does not emit fluorescence). Examples of dark quenchers are further described in U.S. Pat. Nos. 8,822,673 and 8,586,718; U.S. patent publications 20140378330, 20140349295, and 20140194611; and international patent applications: WO200142505 and WO200186001, all if which are hereby incorporated by reference in their entirety.

[0151] Examples of fluorescent labels include, but are not limited to: an Alexa Fluor® dye, an ATTO dye (e.g., ATTO 390, ATTO 425, ATTO 465, ATTO 488, ATTO 495, ATTO 514, ATTO 520, ATTO 532, ATTO Rho6G, ATTO 542, ATTO 550, ATTO 565, ATTO Rho3B, ATTO Rho11, ATTO Rho12, ATTO Thio12, ATTO Rho101, ATTO 590, ATTO 594, ATTO Rho13, ATTO 610, ATTO 620, ATTO Rho14, ATTO 633, ATTO 647, ATTO 647N, ATTO 655, ATTO Oxa12, ATTO 665, ATTO 680, ATTO 700, ATTO 725, ATTO 740), a DyLight dye, a cyanine dye (e.g., Cy2, Cy3, Cy3.5, Cy3b, Cy5, Cy5.5, Cy7, Cy7.5), a FluoProbes dye, a Sulfo Cy dye, a Seta dye, an IRIS Dye, a SeTau dye, an SRfluor dye, a Square dye, fluorescein (FITC), tetramethylrhodamine (TRITC), Texas Red, Oregon Green, Pacific Blue, Pacific Green, Pacific Orange, a Biotium fluorescent dye (e.g., CF 640R, e.g., iCF640RN), quantum dots, and a tethered fluorescent protein.

[0152] In some cases, a detectable label is a fluorescent label selected from: an Alexa Fluor® dye, an ATTO dye (e.g., ATTO 390, ATTO 425, ATTO 465, ATTO 488, ATTO 495, ATTO 514, ATTO 520, ATTO 532, ATTO Rho6G, ATTO 542, ATTO 550, ATTO 565, ATTO Rho3B, ATTO Rho11, ATTO Rho12, ATTO Thio12, ATTO Rho101, ATTO 590, ATTO 594, ATTO Rho13, ATTO 610, ATTO 620, ATTO Rho14, ATTO 633, ATTO 647, ATTO 647N, ATTO 655, ATTO Oxa12, ATTO 665, ATTO 680, ATTO 700, ATTO 725, ATTO 740), a DyLight dye, a cyanine dye (e.g., Cy2, Cy3, Cy3.5, Cy3b, Cy5, Cy5.5, Cy7, Cy7.5), a FluoProbes dye, a Sulfo Cy dye, a Seta dye, an IRIS Dye, a SeTau dye, an SRfluor dye, a Square dye, fluorescein (FITC), tetramethylrhodamine (TRITC), Texas Red, Oregon Green, Pacific Blue, Pacific Green, Pacific Orange, and a Biotium fluorescent dye (e.g., CF 640R, e.g., iCF640RN).

[0153] In some cases, a detectable label is a fluorescent label selected from: an Alexa Fluor® dye, an ATTO dye (e.g., ATTO 390, ATTO 425, ATTO 465, ATTO 488, ATTO 495, ATTO 514, ATTO 520, ATTO 532, ATTO Rho6G, ATTO 542, ATTO 550, ATTO 565, ATTO Rho3B, ATTO Rho11, ATTO Rho12, ATTO Thio12, ATTO Rho101, ATTO 590, ATTO 594, ATTO Rho13, ATTO 610, ATTO 620, ATTO Rho14, ATTO 633, ATTO 647, ATTO 647N, ATTO 655, ATTO Oxa12, ATTO 665, ATTO 680, ATTO 700, ATTO 725, ATTO 740), a DyLight dye, a cyanine dye (e.g., Cy2, Cy3, Cy3.5, Cy3b, Cy5, Cy5.5, Cy7, Cy7.5), a FluoProbes dye, a Sulfo Cy dye, a Seta dye, an IRIS Dye, a SeTau dye, an SRfluor dye, a Square dye, fluorescein (FITC), tetramethylrhodamine (TRITC), Texas Red, Oregon Green, Pacific Blue, Pacific Green, Pacific Orange, a Biotium fluorescent dye (e.g., CF 640R, e.g., iCF640RN), a quantum dot, and a tethered fluorescent protein.

[0154] Examples of ATTO dyes include, but are not limited to: ATTO 390, ATTO 425, ATTO 465, ATTO 488, ATTO 495, ATTO 514, ATTO 520, ATTO 532, ATTO Rho6G, ATTO 542, ATTO 550, ATTO 565, ATTO Rho3B, ATTO Rho11, ATTO Rho12, ATTO Thio12, ATTO Rho101, ATTO 590, ATTO 594, ATTO Rho13, ATTO 610, ATTO 620, ATTO Rho14, ATTO 633, ATTO 647, ATTO 647N, ATTO 655, ATTO Oxa12, ATTO 665, ATTO 680, ATTO 700, ATTO 725, and ATTO 740.

[0155] Examples of AlexaFluor dyes include, but are not limited to: Alexa Fluor® 350, Alexa Fluor® 405, Alexa Fluor® 430, Alexa Fluor® 488, Alexa Fluor® 500, Alexa Fluor® 514, Alexa Fluor® 532, Alexa Fluor® 546, Alexa Fluor® 555, Alexa Fluor® 568, Alexa Fluor® 594, Alexa Fluor® 610, Alexa Fluor® 633, Alexa Fluor® 635, Alexa Fluor® 647, Alexa Fluor® 660, Alexa Fluor® 680, Alexa Fluor® 700, Alexa Fluor® 750, Alexa Fluor® 790, and the like.

[0156] Examples of quencher moieties include, but are not limited to: a dark quencher, a Black Hole Quencher® (BHQ®) (e.g., BHQ-0, BHQ-1, BHQ-2, BHQ-3), a Qxl quencher, an ATTO quencher (e.g., ATTO 540Q, ATTO 580Q, and ATTO 612Q), dimethylaminoazobenzenesulfonic acid (Dabsyl), Iowa Black RQ (e.g., 5IAbRQ, iIB-QB), Iowa Black FQ (e.g., 5IAbkFQ), ZEN, IRDye QC-1, a QSY dye (e.g., QSY 7, QSY 9, QSY 21), AbsoluteQuencher, Eclipse, and metal clusters such as gold nanoparticles, and the like.

[0157] In some cases, a quencher moiety is selected from: a dark quencher, a Black Hole Quencher® (BHQ®) (e.g., BHQ-0, BHQ-1, BHQ-2, BHQ-3), a Qxl quencher, an ATTO quencher (e.g., ATTO 540Q, ATTO 580Q, and ATTO 612Q), dimethylaminoazobenzenesulfonic acid (Dabsyl), Iowa Black RQ (e.g., 5IAbRQ, iIB-QB), Iowa Black FQ (e.g., 5IAbkFQ), ZEN, IRDye QC-1, a QSY dye (e.g., QSY 7, QSY 9, QSY 21), AbsoluteQuencher, Eclipse, and a metal cluster.

[0158] Examples of an ATTO quencher include, but are not limited to: ATTO 540Q, ATTO 580Q, and ATTO 612Q. Examples of a Black Hole Quencher® (BHQ®) include, but are not limited to: BHQ-0 (493 nm), BHQ-1 (534 nm), BHQ-2 (579 nm) and BHQ-3 (672 nm).

[0159] For examples of some detectable labels (e.g., fluorescent dyes) and/or quencher moieties, see, e.g., Bao et. al., Annu Rev Biomed Eng. 2009; 11:25-47; as well as U.S. Pat. Nos. 8,822,673 and 8,586,718; U.S. patent publications 20140378330, 20140349295, 20140194611, 20130323851, 20130224871, 20110223677, 20110190486, 20110172420, 20060179585 and 20030003486; and international patent applications: WO200142505 and WO200186001, all of which are hereby incorporated by reference in their entirety.

[0160] In some embodiments, a quenched PAMmer includes two or more (e.g., 3 or more, 4 or more, 5 or more, etc.) detectable labels and/or two or more (e.g., 3 or more, 4 or more, 5 or more, etc.) quencher moieties, e.g., in some cases to increase signal to noise. For example the two or more (e.g., 3 or more, 4 or more, 5 or more, etc.) detectable labels can be the same label or can be labels that elicit an additive signal. As another example, the two or more (e.g., 3 or more, 4 or more, 5 or more, etc.) quencher moieties can be the same moiety or can be different moieties that quench the same or overlapping signals, e.g., to provide increased quenching prior to cleavage.

[0161] In some embodiments, a quenched PAMmer includes two or more (e.g., 3 or more, 4 or more, 5 or more, etc.) detectable labels and/or two or more (e.g., 3 or more, 4 or more, 5 or more, etc.) quencher moieties, e.g., in some cases to label multiple different entities. As an illustrative example, the fragment of the quenched PAMmer that hybridizes with the target single stranded nucleic acid after cleavage (the hybridizing fragment, the first cleavage product) can have a first detectable label and a first quencher moiety, while the fragment of the quenched PAMmer that does not hybridize with the target single stranded nucleic acid after cleavage (the non-hybridizing fragment, the second cleavage product) can have a second detectable label (distinguishable from the first detectable label) and a second quencher moiety, where the first quencher moiety quenches the signal of the second detectable label (but does not quench the signal of the first detectable label); and the second quencher moiety quenches the signal of the first detectable label (but does not quench the signal of the second detectable label). In such a case, after cleavage, the target single stranded nucleic acid will be detectable by virtue of being hybridized to the hybridizing fragment (the first cleavage product) of the cleaved quenched PAMmer, while the non-hybridizing fragment (the second cleavage product) of the cleaved quenched PAMmer would also be detectable, but the signal of the first and second cleavage products would be distinguishable.

[0162] As another illustrative example, the fragment of the quenched PAMmer that hybridizes with the target single stranded nucleic acid after cleavage (the hybridizing fragment, the first cleavage product) can have a first detectable label, while the fragment of the quenched PAMmer that does not hybridize with the target single stranded nucleic acid after cleavage (the non-hybridizing fragment, the second cleavage product) can have a second detectable label (distinguishable from the first detectable label) and a quencher moiety that quenches the signal of the first detectable label (but does not quench the signal of the second detectable label). Thus, the uncleaved quenched PAMmer would be detectable via the second detectable label, as would the non-hybridizing fragment (the second cleavage product), because no quencher would be present to quench the second detectable label. However, the first detectable label would only be detectable after cleavage (i.e., removal of the quencher moiety). Thus, in such a scenario, one signal (from the second detectable label) would represent pre-cleaved quenched PAMmer plus the non-hybridizing fragment (the second cleavage product) of the quenched PAMmer, while another signal (from the first detectable label) would represent the hybridizing fragment (the first cleavage product) of the quenched PAMmer and would be detectable only after cleavage of the quenched PAMmer. In a similar scenario, the second detectable label could be positioned so that it will be part of the hybridizing fragment and therefore signal from the second label would represent uncleaved PAMmer plus hybridized cleavage product. In other words, the second detectable label would be constitutively ‘on’ and not quenched (and would represent uncleaved PAMmer plus cleaved hybridizing product) while the first detectable label would only be detectable after cleavage (and would represent the hybridizing cleavage product).

[0163] As yet another illustrative example, the above examples could be combined and three distinguishable detectable labels/quencher moieties used such that one could distinguishably (and even simultaneously) detect pre-cleavage quenched PAMmers, post-cleavage non-hybridizing fragments (the second cleavage product), and post-cleavage hybridizing fragments (the first cleavage product).

[0164] PAM Sequence

[0165] A wild type Cas9 protein normally has nuclease activity that cleaves a target nucleic acid (e.g., a double stranded DNA (dsDNA)) at a target site defined by the region of complementarity between the targeting segment of the Cas9 guide RNA and the target nucleic acid. In some cases, site-specific cleavage of the target nucleic acid occurs at locations determined by both (i) base-pairing complementarity between the Cas9 guide RNA and the target nucleic acid; and (ii) a short motif referred to as the protospacer adjacent motif (PAM) in the target nucleic acid. When a Cas9 polypeptide binds to (in some cases cleaves) a dsDNA target nucleic acid, the PAM sequence that is recognized (bound) by the Cas9 protein is present on the non-complementary strand (the strand that does not hybridize with the targeting segment of the Cas9 guide RNA) of the target DNA. Thus, when a Cas9 protein binds to (in some cases cleaves) a single stranded target nucleic acid, no PAM sequence is present because there is no non-complementary strand (see FIG. 8). A subject PAMmer provides a PAM sequence, which is positioned near the target site (the sequence targeted by the targeting segment of the Cas9 guide RNA) by the orientation segment and/or the specificity segment of the PAMmer.

[0166] In some embodiments, the PAM sequence of the PAMmer is complementary to (i.e., hybridizes with) the target nucleic acid (FIG. 1, FIG. 4A, FIG. 8). In some embodiments, the PAM sequence of the PAMmer is not complementary to (i.e., does not hybridize with) the target nucleic acid (FIG. 2B, FIG. 6, FIG. 8). In some embodiments, a PAM sequence of a PAMmer has a length in a range of from 1 nt to 15 nt (e.g., 1 nt to 14 nt, 1 nt to 13 nt, 1 nt to 12 nt, 1 nt to 11 nt, 1 nt to 10 nt, 1 nt to 9 nt, 1 nt to 9 nt, 1 nt to 8 nt, 1 nt to 7 nt, 1 nt to 6 nt, 1 nt to 5 nt, 1 nt to 4 nt, 1 nt to 3 nt, 2 nt to 15 nt, 2 nt to 14 nt, 2 nt to 13 nt, 2 nt to 12 nt, 2 nt to 11 nt, 2 nt to 10 nt, 2 nt to 9 nt, 2 nt to 8 nt, 2 nt to 7 nt, 2 nt to 6 nt, 2 nt to 5 nt, 2 nt to 4 nt, 2 nt to 3 nt, 2 nt, or 3 nt).

[0167] In some embodiments (e.g., when the Cas9 protein from S. pyogenes or a closely related Cas9 is used; see for example, Chylinski et al., RNA Biol. 2013 May; 10(5):726-37; and Jinek et al., Science. 2012 Aug. 17; 337(6096):816-21; both of which are hereby incorporated by reference in their entirety), the PAM sequence of the PAMmer can be GG (5′-GG-3′), or can be 5′-NGG-3′, where N is any nucleotide. In some embodiments (e.g., when a Cas9 protein from Neisseria meningitidis or a closely related Cas9 is used), the PAM sequence of the PAMmer can be 5′-NNNNGANN-3′, 5′-NNNNGTTN-3′, 5′-NNNNGNNT-3′, 5′-NNNNGTNN-3′, 5′-NNNNGNTN-3′, or 5′-NNNNGATT-3′, where N is any nucleotide. In some embodiments (e.g., when a Cas9 protein from Streptococcus thermophilus #1 or a closely related Cas9 is used), the PAM sequence of the PAMmer can be 5′-NNAGAA-3′, 5′-NNAGGA-3′, 5′-NNGGAA-3′, 5′-NNANAA-3′, or 5′-NNGGGA-3′ where N is any nucleotide. In some embodiments (e.g., when a Cas9 protein from Treponema denticola (TD) or a closely related Cas9 is used), the PAM sequence of the PAMmer can be 5′-NAAAAN-3′, 5′-NAAAAC-3′, 5′-NAAANC-3′, 5′-NANAAC-3′, or 5′-NNAAAC-3′, where N is any nucleotide. As would be known by one of ordinary skill in the art, additional PAM sequences for other Cas9 proteins can readily be determined using bioinformatic analysis (e.g, analysis of genomic sequencing data). See Esvelt et al., Nat Methods. 2013 November; 10(11):1116-21, for additional information.

[0168] Specificity Segment

[0169] A specificity segment can be present or absent in a subject PAMmer (the PAMmer has a specificity segment, an orientation segment, or both a specificity segment and an orientation segment), and when present, the specificity segment is positioned 5′ of the PAM sequence. As noted above, in some cases, a PAMmer having a specificity segment is referred to herein as a “5′-extended PAMmer.” The specificity segment hybridizes to (i.e., targets) a sequence of a target nucleic that overlaps with the target site such that the PAM sequence is positioned near the target site (the sequence of the target nucleic acid that is targeted by the Cas9 guide RNA). Thus, the PAMmer provides a PAM sequence at any desired location within a target nucleic acid (e.g., by designing the specificity segment of the PAMmer to hybridize to any desired nucleotide sequence of the target nucleic acid).

[0170] A specificity segment can have a length of from 3 nucleotides (nt) to 100 nt (e.g., from 3 nt to 80 nt, from 3 nt to 50 nt, from 3 nt to 40 nt, from 5 nt to 40 nt, from 5 nt to 35 nt, from 5 nt to 30 nt, from 5 nt to 25 nt, from 10 nt to 40 nt, from 10 nt to 35 nt, from 10 nt to 30 nt, from 10 nt to 25 nt, from 10 nt to 20 nt, from 12 nt to 40 nt, from 12 nt to 35 nt, from 12 nt to 30 nt, from 12 nt to 25 nt, from 12 nt to 20 nt, from 15 nt to 40 nt, from 15 nt to 35 nt, from 15 nt to 30 nt, from 15 nt to 25 nt, from 15 nt to 20 nt, from 17 nt to 40 nt, from 17 nt to 35 nt, from 17 nt to 30 nt, from 17 nt to 25 nt, from 17 nt to 20 nt, from 18 nt to 40 nt, from 18 nt to 35 nt, from 18 nt to 30 nt, from 18 nt to 25 nt, from 18 nt to 20 nt, from 20 nt to 40 nt, from 20 nt to 35 nt, from 20 nt to 30 nt, or from 20 nt to 25 nt). In some cases, the specificity segment is 20 nucleotides in length. In some cases, the specificity segment is 19 nucleotides in length.

[0171] The percent complementarity between the specificity segment and the sequence of the target nucleic acid targeted by the specificity segment (e.g., a sequence of the target site, where the target site is the sequence to which the Cas9 guide RNA hybridizes) can be 60% or more (e.g., 65% or more, 70% or more, 75% or more, 80% or more, 85% or more, 90% or more, 95% or more, 97% or more, 98% or more, 99% or more, or 100%). In some cases, the percent complementarity between the specificity segment and the sequence of the target nucleic acid targeted by the specificity segment is 60% or more (e.g., 65% or more, 70% or more, 75% or more, 80% or more, 85% or more, 90% or more, 95% or more, 97% or more, 98% or more, 99% or more, or 100%) over a stretch of about 10 to 30 contiguous nucleotides (nt) (e.g. 15 to 30 contiguous nt, 15 to 25 contiguous nt, 17 to 30 contiguous t, 17 to 25 contiguous t, or 18 to 22 contiguous nt). In some cases, the percent complementarity between the specificity segment and the sequence of the target nucleic acid targeted by the specificity segment is 60% or more (e.g., 65% or more, 70% or more, 75% or more, 80% or more, 85% or more, 90% or more, 95% or more, 97% or more, 98% or more, 99% or more, or 100%) over 10 or more contiguous nucleotides (nt) (e.g. 12 or more contiguous nt, 15 or more contiguous nt, 17 or more contiguous nt, 18 or more contiguous nt, 19 or more contiguous nt, or 20 or more contiguous nt).

[0172] In some cases, the sequence targeted by the specificity segment of a PAMmer (i.e., the sequence to which the specificity segment of a PAMmer hybridizes) is 100% identical to the target site (i.e., the sequence to which the Cas9 guide RNA hybridizes). However, the sequence targeted by the specificity segment of a PAMmer need not be 100% identical to the target site. For example, in some cases, the sequence targeted by the specificity segment of a PAMmer overlaps with the sequence targeted by the Cas9 guide RNA, but the overlap is not 100%. For example, the sequence targeted by the specificity segment of a PAMmer can be a subset of the target site (e.g., a subset of the sequence to which the Cas9 guide RNA hybridizes). Thus, when a specificity segment of a PAMmer is said to hybridize with nucleotides of a target site, it does not necessarily mean that the specificity segment hybridizes with the entire target site, but encompasses cases where the specificity segment hybridizes with a subset of the nucleotides of the target site. In some cases, the sequence targeted by the specificity segment of a PAMmer (i.e., the sequence to which the specificity segment of a PAMmer hybridizes) is shorter than the sequence targeted by the Cas9 guide RNA (i.e., shorter than the sequence of the target site).

[0173] In some cases, the sequence targeted by the specificity segment of a PAMmer is longer than the sequence targeted by the targeting segment of the Cas9 guide RNA. In some cases, the sequence targeted by the specificity segment of a PAMmer is the same length as the sequence targeted by the targeting segment of the Cas9 guide RNA.

[0174] In some cases, the sequence targeted by the specificity segment of a PAMmer (i.e., the sequence to which the specificity segment of a PAMmer hybridizes) shares 2 nucleotides (nt) or more with the sequence targeted by the targeting segment of the Cas9 guide RNA (the target site) (e.g., 3 nt or more, 5 nt or more, 8 nt or more, 10 nt or more, 12 nt or more, 15 nt or more, 18 nt or more, etc.). In some cases, the sequence targeted by the specificity segment of a PAMmer (i.e., the sequence to which the specificity segment of a PAMmer hybridizes) shares 2 nucleotides (nt) to 30 nt with the sequence targeted by the targeting segment of the Cas9 guide RNA (e.g., 5 nt to 30 nt, 5 nt to 25 nt, 5 nt to 22 nt, 8 nt to 30 nt, 8 nt to 25 nt, 8 nt to 22 nt, 8 nt to 20 nt, 10 nt to 30 nt, 10 nt to 25 nt, 10 nt to 22 nt, 10 nt to 20 nt, 12 nt to 30 nt, 12 nt to 25 nt, 12 nt to 22 nt, 12 nt to 20 nt, 15 nt to 30 nt, 15 nt to 25 nt, 15 nt to 22 nt, 15 nt to 20 nt, 18 nt to 30 nt, 18 nt to 25 nt, 18 nt to 22 nt, or 18 nt to 20 nt).

[0175] In some cases, the sequence targeted by the specificity segment of a PAMmer (i.e., the sequence to which the specificity segment of a PAMmer hybridizes) shares up to 20 nucleotides (nt) with the sequence targeted by the targeting segment of the Cas9 guide RNA (e.g., up to 19 nt, up to 18 nt, up to 17 nt, up to 16 nt, up to 15 nt, up to 14 nt, up to 13 nt, up to 12 nt, up to 11 nt, up to 10 nt, up to 9 nt, up to 8 nt, up to 7 nt, up to 6 nt, up to 5 nt, or up to 4 nt with the sequence targeted by the targeting segment of the Cas9 guide RNA).

[0176] In some cases, the sequence targeted by the specificity segment of a PAMmer (i.e., the sequence to which the specificity segment of a PAMmer hybridizes) shares in a range of from 2 nucleotides (nt) to 30 nt with the sequence targeted by the targeting segment of the Cas9 guide RNA (e.g., from 5 nt to 30 nt, from 5 nt to 25 nt, from 5 nt to 22 nt, from 8 nt to 30 nt, from 8 nt to 25 nt, from 8 nt to 22 nt, from 8 nt to 20 nt, from 10 nt to 30 nt, from 10 nt to 25 nt, from 10 nt to 22 nt, from 10 nt to 20 nt, from 12 nt to 30 nt, from 12 nt to 25 nt, from 12 nt to 22 nt, from 12 nt to 20 nt, from 15 nt to 30 nt, from 15 nt to 25 nt, from 15 nt to 22 nt, from 15 nt to 20 nt, from 18 nt to 30 nt, from 18 nt to 25 nt, from 18 nt to 22 nt, from 18 nt to 20 nt, from 3 nt to 25 nt, from 3 nt to 20 nt, from 3 nt to 15 nt, from 3 nt to 12 nt, from 3 nt to 10 nt, from 3 nt to 8 nt, from 3 nt to 6 nt, from 5 nt to 25 nt, from 5 nt to 20 nt, from 5 nt to 15 nt, from 5 nt to 12 nt, from 5 nt to 10 nt, from 5 nt to 8 nt, or from 5 nt to 7 nt with the sequence targeted by the targeting segment of the Cas9 guide RNA).

[0177] In some embodiments, a PAMmer has a specificity segment, but does not have an orientation segment (i.e., the PAMmer does not have a nucleotide sequence 3′ of the PAM sequence that hybridizes with the target nucleic acid) (FIG. 8E). In some such cases, the PAM sequence can be at the 3′ end of the PAMmer (i.e., the PAMmer can have 0 nucleotides 3′ of the PAM sequence), or the PAMmer can have 1 or more nucleotides (nt) 3′ of the PAM sequence (e.g., 2 or more nt, 3 or more nt, 4 or more nt, 5 or more nt, 10 or more nt, 15 or more nt, 20 or more nt, etc.), where the nucleotides 3′ of the PAM sequence do not hybridize to the target nucleic acid. In some cases in which a PAMmer does not have an orientation segment, a PAMmer can have a nucleotide sequence, 3′ of the PAM sequence, with a length in a range of from 1 nucleotide (nt) to 20 nt (e.g., from 1 nt to 18 nt, from 1 nt to 16 nt, from 1 nt to 14 nt, from 1 nt to 12 nt, from 1 nt to 10 nt, from 1 nt to 9 nt, from 1 nt to 8 nt, from 1 nt to 7 nt, from 1 nt to 6 nt, from 1 nt to 5 nt, from 1 nt to 4 nt, or from 1 nt to 3 nt), where the nucleotides 3′ of the PAM sequence do not hybridize to the target nucleic acid. For example, if a PAMmer has nucleotides 3′ of the PAM sequence that do hybridize to the target nucleic acid, then the nucleotides that hybridize would be considered an (or part of an) orientation segment.

[0178] In some cases, the length of the specificity segment inversely correlates with efficiency of the cleavage reaction and positively correlates with specificity (i.e., reduction of off-target effects). Thus, there can be a trade-off between the desired level of cleavage and the desired level of specificity. The presence (as well as the length) of a specificity segment can be determined based on the particular target nucleic acid, the nature/purpose of the method, and/or the desired outcome. For example, if maximum specificity is desired, but cleavage efficiency is not a concern, then a long specificity segment may be desirable. On the other hand, if maximum cleavage is desired, but specificity is not a concern (e.g., the orientation segment of the PAMmer provides for adequate specificity), then a shorter specificity segment (e.g., no specificity segment) may be desirable.

[0179] For methods of binding, the presence of a specificity segment can increase binding specificity. Not to be bound by theory, it is believed that this is because the specificity segment provides an energetic barrier to binding that can be overcome by the presence of a targeting segment in the Cas9 guide RNA that has complementarity to (i.e., can hybridize with) that target nucleic acid, thus displacing the specificity segment of the PAMmer.

[0180] Orientation Segment

[0181] An orientation segment can be present or absent in a subject PAMmer (the PAMmer has a specificity segment, an orientation segment, or both a specificity segment and an orientation segment), and when present, the orientation segment is positioned 3′ of the PAM sequence. The orientation segment hybridizes to (i.e., targets) a sequence of a target nucleic (the orientation site) such that the PAM sequence is positioned near the target site (i.e., the sequence of the target nucleic acid that is targeted by the targeting segment of the Cas9 guide RNA). Thus, the PAMmer provides a PAM sequence at any desired location within a target nucleic acid (e.g., by designing the orientation segment of the PAMmer to hybridize to any desired nucleotide sequence of the target nucleic acid).

[0182] The orientation segment can have a length of from 3 nucleotides (nt) to 100 nt (e.g., from 3 nt to 80 nt, from 3 nt to 50 nt, from 3 nt to 40 nt, from 5 nt to 40 nt, from 5 nt to 35 nt, from 5 nt to 30 nt, from 5 nt to 25 nt, from 10 nt to 40 nt, from 10 nt to 35 nt, from 10 nt to 30 nt, from 10 nt to 25 nt, from 10 nt to 20 nt, from 12 nt to 40 nt, from 12 nt to 35 nt, from 12 nt to 30 nt, from 12 nt to 25 nt, from 12 nt to 20 nt, from 15 nt to 40 nt, from 15 nt to 35 nt, from 15 nt to 30 nt, from 15 nt to 25 nt, from 15 nt to 20 nt, from 17 nt to 40 nt, from 17 nt to 35 nt, from 17 nt to 30 nt, from 17 nt to 25 nt, from 17 nt to 20 nt, from 18 nt to 40 nt, from 18 nt to 35 nt, from 18 nt to 30 nt, from 18 nt to 25 nt, from 18 nt to 20 nt, from 20 nt to 40 nt, from 20 nt to 35 nt, from 20 nt to 30 nt, or from 20 nt to 25 nt). In some cases, the orientation segment is 20 nucleotides in length. In some cases, the orientation segment is 19 nucleotides in length.

[0183] The percent complementarity between the orientation segment and the sequence of the target nucleic acid targeted by the orientation segment can be 60% or more (e.g., 65% or more, 70% or more, 75% or more, 80% or more, 85% or more, 90% or more, 95% or more, 97% or more, 98% or more, 99% or more, or 100%). In some cases, the percent complementarity between the orientation segment and the sequence of the target nucleic acid targeted by the orientation segment is 60% or more (e.g., 65% or more, 70% or more, 75% or more, 80% or more, 85% or more, 90% or more, 95% or more, 97% or more, 98% or more, 99% or more, or 100%) over about 10 to 30 contiguous nucleotides (nt) (e.g. 15 to 30 contiguous nt, 15 to 25 contiguous nt, 17 to 30 contiguous nt, 17 to 25 contiguous nt, or 18 to 22 contiguous nt). In some cases, the percent complementarity between the orientation segment and the sequence of the target nucleic acid targeted by the orientation segment is 60% or more (e.g., 65% or more, 70% or more, 75% or more, 80% or more, 85% or more, 90% or more, 95% or more, 97% or more, 98% or more, 99% or more, or 100%) over 10 or more contiguous nucleotides (nt) (e.g. 12 or more contiguous nt, 15 or more contiguous nt, 17 or more contiguous nt, 18 or more contiguous nt, 19 or more contiguous nt, or 20 or more contiguous nt).

[0184] In some cases, the sequence targeted by the orientation segment of a PAMmer is immediately adjacent to the sequence targeted by the targeting segment of the Cas9 guide RNA. In some embodiments, 10 or less nt (e.g., 9 or less nt, 8 or less nt, 7 or less nt, 6 or less nt, 5 or less nt, 4 or less nt, 3 or less nt, 2 or less nt, 1 or less nt, or no nt) are present in the target nucleic acid between the sequence targeted by the targeting segment of the Cas9 guide RNA (i.e., the target site) and the sequence targeted by the orientation segment of the PAMmer (e.g., sometimes referred to as the second target site). In some cases, the sequence of the target nucleic acid that is targeted by the orientation segment of a PAMmer is within 10 or fewer nucleotides (nt) (e.g., 9 or fewer nt, 8 or fewer nt, 7 or fewer nt, 6 or fewer nt, 5 or fewer nt, 4 or fewer nt, 3 or fewer nt, 2 or fewer nt, 1 or fewer nt, or no nt) of the sequence targeted by the targeting segment of the Cas9 guide RNA. In some embodiments, the number of nucleotides (nt) present in the target nucleic acid between the sequence targeted by the targeting segment of the Cas9 guide RNA (i.e., the target site) and the sequence targeted by the orientation segment of the PAMmer is in a range of from 0 nt to 10 nt (e.g., 0 nt to 9 nt, 0 nt to 8 nt, 0 nt to 7 nt, 0 nt to 6 nt, 0 nt to 5 nt, 0 nt to 4 nt, 0 nt to 3 nt, 1 nt to 9 nt, 1 nt to 8 nt, 1 nt to 7 nt, 1 nt to 6 nt, 1 nt to 5 nt, 1 nt to 4 nt, 1 nt to 3 nt, 2 nt to 9 nt, 2 nt to 8 nt, 2 nt to 7 nt, 2 nt to 6 nt, 2 nt to 5 nt, 2 nt to 4 nt, or 2 nt to 3 nt).

[0185] In some cases, a PAMmer has an orientation segment, but does not have a specificity segment (i.e., the PAMmer does not have a nucleotide sequence 5′ of the PAM sequence that hybridizes with the target nucleic acid), but does have an orientation segment (FIG. 8F). In some such cases, the PAM sequence can be at the 5′ end of the PAMmer (i.e., the PAMmer can have 0 nucleotides 5′ of the PAM sequence), or the PAMmer can have 1 or more nucleotides (nt) 5′ of the PAM sequence (e.g., 2 or more nt, 3 or more nt, 4 or more nt, 5 or more nt, 10 or more nt, 15 or more nt, 20 or more nt, etc.), where the nucleotides 5′ of the PAM sequence do not hybridize to the target nucleic acid. In some cases in which a PAMmer does not have a specificity segment, a PAMmer can have a nucleotide sequence, 5′ of the PAM sequence, with a length in a range of from 1 nucleotide (nt) to 20 nt (e.g., from 1 nt to 18 nt, from 1 nt to 16 nt, from 1 nt to 14 nt, from 1 nt to 12 nt, from 1 nt to 10 nt, from 1 nt to 9 nt, from 1 nt to 8 nt, from 1 nt to 7 nt, from 1 nt to 6 nt, from 1 nt to 5 nt, from 1 nt to 4 nt, or from 1 nt to 3 nt), where the nucleotides 5′ of the PAM sequence do not hybridize to the target nucleic acid. For example, if a PAMmer has nucleotides 5′ of the PAM sequence that do hybridize to the target nucleic acid, then the nucleotides that hybridize would be considered a (or part of a) specificity segment.

[0186] In some cases (e.g., those involving methods of binding, where the PAMmer does not have a specificity segment), the target site of the target nucleic acid can be determined by the orientation segment of the PAMmer and not by the targeting segment of the Cas9 guide RNA. In some cases, the targeting segment of the Cas9 guide RNA does not have complementarity to a nucleotide sequence of the target nucleic acid. In some cases, the targeting segment of the Cas9 guide RNA does not have complementarity to a nucleotide sequence of the target nucleic acid that is near (e.g., within 20 or fewer nucleotides (nt), within 30 or fewer nt, within 40 or fewer t, within 50 or fewer nt, within 60 or fewer nt, within 70 or fewer nt, within 80 or fewer nt, within 90 or fewer nt, or within 100 or fewer nt) the orientation site. However, the orientation segment of the PAMmer still positions the PAM sequence of the PAMmer such that the target nucleic acid can still be bound and/or cleaved by a Cas9 protein (e.g, see FIG. 5).

[0187] Stability Control Sequence (e.g., Transcriptional Terminator Segment)

[0188] In some embodiments, a PAMmer comprises a stability control sequence. A stability control sequence influences the stability of a nucleic acid (e.g., a Cas9 guide RNA, a targeter, an activator, a PAMmer etc.). One example of a suitable stability control sequence for use with an RNA is a transcriptional terminator segment (i.e., a transcription termination sequence). A transcriptional terminator segment of a Cas9 guide RNA can have a total length of from about 10 nucleotides to about 100 nucleotides, e.g., from about 10 nucleotides (nt) to about 20 nt, from about 20 nt to about 30 nt, from about 30 nt to about 40 nt, from about 40 nt to about 50 nt, from about 50 nt to about 60 nt, from about 60 nt to about 70 nt, from about 70 nt to about 80 nt, from about 80 nt to about 90 nt, or from about 90 nt to about 100 nt. For example, the transcriptional terminator segment can have a length of from about 15 nucleotides (nt) to about 80 nt, from about 15 nt to about 50 nt, from about 15 nt to about 40 nt, from about 15 nt to about 30 nt or from about 15 nt to about 25 nt.

[0189] In some cases, the transcription termination sequence is one that is functional in a eukaryotic cell. In some cases, the transcription termination sequence is one that is functional in a prokaryotic cell.

[0190] Non-limiting examples of nucleotide sequences that can be included in a stability control sequence (e.g., transcriptional termination segment, or in any segment of the Cas9 guide RNA to provide for increased stability) include sequences set forth in SEQ ID NO:683-696 and, for example, 5′-UAAUCCCACAGCCGCCAGUUCCGCUGGCGGCAUUUU-5′ (SEQ ID NO:795) (a Rho-independent trp termination site).

[0191] Additional Sequences

[0192] In some embodiments, a PAMmer comprises an additional segment or segments (in some cases at the 5′ end, in some cases the 3′ end, in some cases at either the 5′ or 3′ end, in some cases embedded within the sequence (i.e., not at the 5′ and/or 3′ end), in some cases at both the 5′ end and the 3′ end, in some cases embedded and at the 5′ end and/or the 3′ end, etc). For example, a suitable additional segment can comprise a 5′ cap (e.g., a 7-methylguanylate cap (m⁷G)); a 3′ polyadenylated tail (i.e., a 3′ poly(A) tail); a ribozyme sequence (e.g. to allow for self-cleavage of a precursor PAMmer and release of a mature PAMmer in a regulated fashion); a riboswitch sequence (e.g., to allow for regulated stability and/or regulated accessibility by proteins and protein complexes); a sequence that forms a dsRNA duplex (i.e., a hairpin)); a sequence that targets an RNA to a subcellular location (e.g., nucleus, mitochondria, chloroplasts, and the like); a modification or sequence that provides for tracking (e.g., direct conjugation to a fluorescent molecule (i.e., fluorescent dye), conjugation to a moiety that facilitates fluorescent detection, a sequence that allows for fluorescent detection, etc.); a modification or sequence that provides a binding site for proteins (e.g., proteins that act on DNA, including transcriptional activators, transcriptional repressors, DNA methyltransferases, DNA demethylases, histone acetyltransferases, histone deacetylases, proteins that bind RNA (e.g., RNA aptamers), labeled proteins, fluorescently labeled proteins, protein translation components (e.g., initiation factors, elongation factors release factors, etc.), RNA editing enzymes (e.g., RNA deaminases, e.g., adenosine deaminase acting on RNA (ADAR), including A to I and/or C to U editing enzymes), RNA splicing factors (e.g., RS domains), RNA and/or DNA helicases, RNA methylases, RNA-binding proteins, and the like); a modification or sequence that provides for increased, decreased, and/or controllable stability; and combinations thereof.

[0193] Cas9 Guide RNA

[0194] A nucleic acid molecule that binds to a Cas9 protein and targets the Cas9 protein to a specific location within the target nucleic acid is referred to herein as a “guide nucleic acid” or “Cas9 guide RNA.” In some cases, a guide nucleic acid is RNA, and in some cases, can be a hybrid nucleic acid that includes both deoxyribonucleotides and ribonucleotides. For the sake of simplicity, as used herein, the terms that include the phrase “guide RNA” (e.g., the terms “Cas9 guide RNA”, “truncated guide RNA”, “guide RNA”, and such) are meant to encompass guide RNAs and guide nucleic acids that include components/regions/sections other than RNA (e.g., deoxyribonucleotide regions; modified nucleotides such as base modifications, sugar modifications, nucleotide linkage modifications, and the like; etc). Also, to distinguish a guide RNA that interacts and guides a Cas9 protein (e.g., a Cas9 variant, a Cas9 fusion protein, a Cas9 heterodimer) from other guide RNAs in the art (e.g., that interact with other proteins), the term “Cas9 guide RNA” is herein used to refer to a guide RNA (and to modified guide RNAs having deoxyribonucleotides and/or other modifications) that interacts with a Cas9 protein and targets the protein to a particular location (the target sequence) within a target nucleic acid. However, when the term “guide RNA” is used in this disclosure, it is meant to refer to a Cas9 guide RNA.

[0195] A Cas9 guide RNA and a Cas9 protein form a complex (i.e., bind via non-covalent interactions). The Cas9 guide RNA provides target specificity to the complex by comprising a nucleotide sequence that is complementary to a sequence of a target nucleic acid. The Cas9 protein of the complex provides the site-specific activity. In other words, the Cas9 protein is guided to a target nucleic acid sequence (e.g. a target sequence in a chromosomal nucleic acid; a target sequence in an extrachromosomal nucleic acid, e.g. an episomal nucleic acid, a minicircle, an ssRNA, an ssDNA, etc.; a target sequence in a mitochondrial nucleic acid; a target sequence in a chloroplast nucleic acid; a target sequence in a plasmid; etc.) by virtue of its association with the Cas9 guide RNA.

[0196] A subject Cas9 guide RNA comprises: a first segment (also referred to herein as a “nucleic acid targeting segment”, or simply a “targeting segment”); and a second segment (also referred to herein as a “protein-binding segment”) in which two stretches of nucleotides hybridize to form a double stranded RNA duplex of a protein binding segment. The first segment (targeting segment) of a Cas9 guide RNA comprises a nucleotide sequence that is complementary to a specific sequence (a target site) within a target nucleic acid (e.g, a target ssRNA, a target ssDNA, the complementary strand of a double stranded target DNA, etc.). The protein-binding segment (or “protein-binding sequence”) interacts with a Cas9 protein. Site-specific binding, modification, and/or cleavage of the target nucleic acid can occur at locations determined by base-pairing complementarity between the Cas9 guide RNA and the target nucleic acid. The protein-binding segment of a subject Cas9 guide RNA comprises two complementary stretches of nucleotides that hybridize to one another to form a double stranded RNA duplex (dsRNA duplex).

[0197] The targeting sequence (the targeting segment) of a Cas9 guide RNA can be modified so that the Cas9 guide RNA can target a Cas9 protein to any desired sequence of any desired target nucleic acid, with the exception (as is known in the art) that the PAM sequence is taken into account. Thus, for example, a Cas9 guide RNA can have a targeting segment with a sequence that can hybridize to a sequence in a eukaryotic nucleic acid (e.g., a eukaryotic chromosome, chromosomal sequence, a eukaryotic RNA, etc.).

[0198] A Cas9 guide RNA can also be described as having a targeter and an activator. In some embodiments, a subject Cas9 guide RNA comprises two separate nucleic acid molecules: an “activator” and a “targeter” and is referred to herein as a “Cas9 dual guide RNA”, a “Cas9 dgRNA”, a “Cas9 double-molecule guide RNA”, a “Cas9 two-molecule guide RNA” a “dual guide RNA”, or a “dgRNA.” In some embodiments, the activator and targeter are covalently linked to one another (e.g., via intervening nucleotides) and the resulting guide RNA is referred to as a “single guide RNA”, a “Cas9 single guide RNA”, a “Cas9 sgRNA”, a “Cas9 single-molecule guide RNA,” a “Cas9 one-molecule guide RNA”, or simply “sgRNA.” For example, in some cases, the activator and targeter of a Cas9 single guide RNA are encoded by a DNA and are transcribed together as a single transcript (e.g., with intervening linker nucleotides). Thus, a Cas9 single guide RNA includes a targeter and an activator that are covalently linked (e.g., linked by intervening nucleotides). In some cases, the 3′ end of the targeter is linked to the 5′ end of the activator. In some cases, the 5′ end of the targeter is linked to the 3′ end of the activator. In some cases, the 5′ end of the targeter is linked to the 5′ end of the activator. In some cases, the 3′ end of the targeter is linked to the 3′ end of the activator. See FIG. 8A and FIG. 8B for schematic representations of example embodiments of Cas9 guide RNAs.

[0199] The term “activator” is used herein to mean a tracrRNA-like molecule (tracrRNA: “trans-acting CRISPR RNA”) of a Cas9 dual guide RNA (and of a Cas9 single guide RNA when the “activator” and the “targeter” are linked together by, e.g., intervening nucleotides). Thus, for example, a Cas9 guide RNA (dgRNA or sgRNA) comprises an activator sequence (e.g., a tracrRNA sequence). As is known in the art a tracr molecule (a tracrRNA) is a naturally existing molecule that hybridizes with a CRISPR RNA molecule (a crRNA) to form a Cas9 dual guide RNA. The term “activator” is used herein to encompass naturally existing tracrRNAs, but also to encompass tracrRNAs with modifications (e.g, truncations, sequence variations, base modifications, backbone modifications, linkage modifications, etc.) where the activator retains at least one function of a tracrRNA (e.g., contributes to the dsRNA duplex to which Cas9 binds). In some cases the activator provides one or more stem loops that can interact with Cas9; in some cases, the activator contributes to the dsRNA duplex to which Cas9 binds (the dsRNA duplex formed from the hybridization of the targeter and the activator) and contributes stem loop 1; in some cases, contributes to the dsRNA duplex to which Cas9 binds (the dsRNA duplex formed from the hybridization of the targeter and the activator) and contributes stem loops 1 and 2; in some cases, contributes to the dsRNA duplex to which Cas9 binds (the dsRNA duplex formed from the hybridization of the targeter and the activator) and contributes stem loops land 3; in some cases, contributes to the dsRNA duplex to which Cas9 binds (the dsRNA duplex formed from the hybridization of the targeter and the activator) and contributes stem loops 1, 2, and 3; etc.). Thus, an activator can be referred to as having a tracr sequence (tracrRNA sequence) and in some cases is a tracrRNA, but the term “activator” is not limited to naturally existing tracrRNAs.

[0200] The term “targeter” is used herein to refer to a crRNA-like molecule (crRNA: “CRISPR RNA”) of a Cas9 dual guide RNA (and of a Cas9 single guide RNA when the “activator” and the “targeter” are linked together, e.g., by intervening nucleotides). Thus, for example, a Cas9 guide RNA (dgRNA or sgRNA) comprises a targeting segment (single stranded) (which comprises nucleotides that hybridize with a target nucleic acid, and a duplex-forming segment (e.g., a duplex forming segment of a crRNA, which can also be referred to as a crRNA repeat). Because the sequence of a targeting segment (the segment that hybridizes with a target sequence of a target nucleic acid) of a targeter is modified by a user to hybridize with a desired target nucleic acid, the sequence of a targeter will often be a non-naturally occurring sequence. However, the duplex-forming segment of a targeter (described in more detail below), which hybridizes with the duplex-forming segment of an activator, can include a naturally existing sequence (e.g., can include the sequence of a duplex-forming segment of a naturally existing crRNA, which can also be referred to as a crRNA repeat). Thus, the term targeter is used herein to distinguish from naturally occurring crRNAs, despite the fact that part of a targeter (e.g., the duplex-forming segment) can include a naturally occurring sequence from a crRNA. However, the term “targeter” encompasses naturally occurring crRNAs.

[0201] The term “duplex-forming segment” is used herein to refer to the stretch of nucleotides of an activator or a targeter that contributes to the formation of the dsRNA duplex by hybridizing to a stretch of nucleotides of a corresponding activator or targeter. In other words, an activator comprises a duplex-forming segment that is complementary to the duplex-forming segment of the corresponding targeter. As such, an activator comprises a duplex-forming segment while a targeter comprises both a duplex-forming segment and the targeting segment of the Cas9 guide RNA (sgRNA or dgRNA). A subject Cas9 single guide RNA comprises an “activator” and a “targeter” where the “activator” and the “targeter” are covalently linked (e.g., by intervening nucleotides).

[0202] A Cas9 guide RNA can also be said to include 3 parts: (i) a targeting sequence (a nucleotide sequence that hybridizes with a sequence of the target nucleic acid); (ii) an activator sequence (as described above) (in some cases, referred to as a tracr sequence); and (iii) a sequence that hybridizes to at least a portion of the activator sequence to form a double stranded duplex. A targeter has (i) and (iii); while an activator has (ii).

[0203] A Cas9 guide RNA (e.g. a dual guide RNA or a single guide RNA) can be comprised of any corresponding activator and targeter pair. Non-limiting examples of nucleotide sequences that can be included in a Cas9 guide RNA (dgRNA or sgRNA) include sequences set forth in SEQ ID NOs:431-679 and 1535-1544, or complements thereof. For example, in some cases, sequences from SEQ ID NOs: 431-562 and 1535-1544 (which are from tracrRNAs) or complements thereof, can pair with sequences from SEQ ID NOs:563-679 (which are from crRNAs), or complements thereof, to form a dsRNA duplex of a protein binding segment.

[0204] As noted above, a targeter comprises both the targeting segment (single stranded) of the Cas9 guide RNA and a stretch (“duplex-forming segment”) of nucleotides that forms one half of the dsRNA duplex of the protein-binding segment of the Cas9 guide RNA. A corresponding tracrRNA-like molecule (activator) comprises a stretch of nucleotides (a duplex-forming segment) that forms the other half of the dsRNA duplex of the protein-binding segment of the Cas9 guide RNA. In other words, a stretch of nucleotides of the targeter is complementary to and hybridizes with a stretch of nucleotides of the activator to form the dsRNA duplex of the protein-binding segment of a Cas9 guide RNA. As such, each targeter can be said to have a corresponding activator (which has a region that hybridizes with the targeter). The targeter molecule additionally provides the single stranded targeting segment. Thus, a targeter and an activator (as a corresponding pair) hybridize to form a Cas9 guide RNA. The exact sequence of a given naturally existing crRNA or tracrRNA molecule is characteristic of the species in which the RNA molecules are found. Examples of suitable activator and targeter sequences include, but are not limited to, those set forth in SEQ ID NOs: 431-679 and 1535-1544. A subject Cas9 guide RNA (dgRNA or sgRNA) can include any corresponding activator and targeter sequence pair.

[0205] Targeting Segment of a Cas9 Guide RNA

[0206] The first segment of a subject guide nucleic acid comprises a nucleotide sequence that is complementary to a sequence (a target site) in a target nucleic acid. In other words, the targeting segment of a subject guide nucleic acid can interact with a target nucleic acid (e.g., dsDNA, ssDNA, dsRNA, ssRNA) in a sequence-specific manner via hybridization (i.e., base pairing). As such, the sequence of the targeting segment may vary and can determine the location within the target nucleic acid that the Cas9 guide RNA and the target nucleic acid will interact. The targeting segment of a Cas9 guide RNA can be modified (e.g., by genetic engineering)/designed to hybridize to any desired sequence (target site) within a target nucleic acid (e.g., a eukaryotic target nucleic acid).

[0207] In some cases, the targeting segment can have a length of 7 or more nucleotides (nt) (e.g., 8 or more, 9 or more, 10 or more, 12 or more, 15 or more, 20 or more, 25 or more, 30 or more, or 40 or more nucleotides). In some cases, the targeting segment can have a length of from 7 to 100 nucleotides (nt) (e.g., from 7 to 80 nt, from 7 to 60 nt, from 7 to 40 nt, from 7 to 30 nt, from 7 to 25 nt, from 7 to 22 nt, from 7 to 20 nt, from 7 to 18 nt, from 8 to 80 nt, from 8 to 60 nt, from 8 to 40 nt, from 8 to 30 nt, from 8 to 25 nt, from 8 to 22 nt, from 8 to 20 nt, from 8 to 18 nt, from 10 to 100 nt, from 10 to 80 nt, from 10 to 60 nt, from 10 to 40 nt, from 10 to 30 nt, from 10 to 25 nt, from 10 to 22 nt, from 10 to 20 nt, from 10 to 18 nt, from 12 to 100 nt, from 12 to 80 nt, from 12 to 60 nt, from 12 to 40 nt, from 12 to 30 nt, from 12 to 25 nt, from 12 to 22 nt, from 12 to 20 nt, from 12 to 18 nt, from 14 to 100 nt, from 14 to 80 nt, from 14 to 60 nt, from 14 to 40 nt, from 14 to 30 nt, from 14 to 25 nt, from 14 to 22 nt, from 14 to 20 nt, from 14 to 18 nt, from 16 to 100 nt, from 16 to 80 nt, from 16 to 60 nt, from 16 to 40 nt, from 16 to 30 nt, from 16 to 25 nt, from 16 to 22 nt, from 16 to 20 nt, from 16 to 18 nt, from 18 to 100 nt, from 18 to 80 nt, from 18 to 60 nt, from 18 to 40 nt, from 18 to 30 nt, from 18 to 25 nt, from 18 to 22 nt, from 18 to 20 nt, 18 nt, 19 nt, or 20 nt).

[0208] In some cases, the nucleotide sequence (the targeting sequence) of the targeting segment that is complementary to a nucleotide sequence (target site) of the target nucleic acid can have a length of 7 or more nucleotides (nt) (e.g., 8 or more, 9 or more, 10 or more, 12 or more, 15 or more, 20 or more, 25 or more, 30 or more, or 40 or more nucleotides). In some cases, the targeting sequence of the targeting segment that is complementary to a target sequence of the target nucleic acid can have a length of from 7 to 100 nucleotides (nt) (e.g., from 7 to 80 nt, from 7 to 60 nt, from 7 to 40 nt, from 7 to 30 nt, from 7 to 25 nt, from 7 to 22 nt, from 7 to 20 nt, from 7 to 18 nt, from 8 to 80 nt, from 8 to 60 nt, from 8 to 40 nt, from 8 to 30 nt, from 8 to 25 nt, from 8 to 22 nt, from 8 to 20 nt, from 8 to 18 nt, from 10 to 100 nt, from 10 to 80 nt, from 10 to 60 nt, from 10 to 40 nt, from 10 to 30 nt, from 10 to 25 nt, from 10 to 22 nt, from 10 to 20 nt, from 10 to 18 nt, from 12 to 100 nt, from 12 to 80 nt, from 12 to 60 nt, from 12 to 40 nt, from 12 to 30 nt, from 12 to 25 nt, from 12 to 22 nt, from 12 to 20 nt, from 12 to 18 nt, from 14 to 100 nt, from 14 to 80 nt, from 14 to 60 nt, from 14 to 40 nt, from 14 to 30 nt, from 14 to 25 nt, from 14 to 22 nt, from 14 to 20 nt, from 14 to 18 nt, from 16 to 100 nt, from 16 to 80 nt, from 16 to 60 nt, from 16 to 40 nt, from 16 to 30 nt, from 16 to 25 nt, from 16 to 22 nt, from 16 to 20 nt, from 16 to 18 nt, from 18 to 100 nt, from 18 to 80 nt, from 18 to 60 nt, from 18 to 40 nt, from 18 to 30 nt, from 18 to 25 nt, from 18 to 22 nt, from 18 to 20 nt, 18 nt, 19 nt, or 20 nt).

[0209] In some cases, the targeting sequence of the targeting segment that is complementary to a target site of the target nucleic acid is 20 nucleotides in length. In some cases, the targeting sequence of the targeting segment that is complementary to a target site of the target nucleic acid is 19 nucleotides in length.

[0210] The percent complementarity between the targeting sequence of the targeting segment and the target site of the target nucleic acid can be 60% or more (e.g., 65% or more, 70% or more, 75% or more, 80% or more, 85% or more, 90% or more, 95% or more, 97% or more, 98% or more, 99% or more, or 100%). In some cases, the percent complementarity between the targeting sequence of the targeting segment and the target site of the target nucleic acid is 100% over the 7 contiguous 5′-most nucleotides of the target site of the target nucleic acid (which can be complementary to the 3′-most nucleotides of the targeting sequence of the Cas9 guide RNA). In some cases, the percent complementarity between the targeting sequence of the targeting segment and the target site of the target nucleic acid is 100% over the 8 contiguous 5′-most nucleotides of the target site of the target nucleic acid (which can be complementary to the 3′-most nucleotides of the targeting sequence of the Cas9 guide RNA). In some cases, the percent complementarity between the targeting sequence of the targeting segment and the target site of the target nucleic acid is 100% over the 9 contiguous 5′-most nucleotides of the target site of the target nucleic acid (which can be complementary to the 3′-most nucleotides of the targeting sequence of the Cas9 guide RNA). In some cases, the percent complementarity between the targeting sequence of the targeting segment and the target site of the target nucleic acid is 100% over the 10 contiguous 5′-most nucleotides of the target site of the target nucleic acid (which can be complementary to the 3′-most nucleotides of the targeting sequence of the Cas9 guide RNA). In some cases, the percent complementarity between the targeting sequence of the targeting segment and the target site of the target nucleic acid is 60% or more (e.g., e.g., 65% or more, 70% or more, 75% or more, 80% or more, 85% or more, 90% or more, 95% or more, 97% or more, 98% or more, 99% or more, or 100%) over about 20 contiguous nucleotides.

[0211] In some cases, the percent complementarity between the targeting sequence of the targeting segment and the target site of the target nucleic acid is 100% over the 7 contiguous 5′-most nucleotides of the target site of the target nucleic acid and as low as 0% or more over the remainder. In such a case, the targeting sequence can be considered to be 7 nucleotides in length. In some cases, the percent complementarity between the targeting sequence of the targeting segment and the target site of the target nucleic acid is 100% over the 8 contiguous 5′-most nucleotides of the target site of the target nucleic acid and as low as 0% or more over the remainder. In such a case, the targeting sequence can be considered to be 8 nucleotides in length. In some cases, the percent complementarity between the targeting sequence of the targeting segment and the target site of the target nucleic acid is 100% over the 9 contiguous 5′-most nucleotides of the target site of the target nucleic acid and as low as 0% or more over the remainder. In such a case, the targeting sequence can be considered to be 9 nucleotides in length. In some cases, the percent complementarity between the targeting sequence of the targeting segment and the target site of the target nucleic acid is 100% over the 10 contiguous 5′-most nucleotides of the target site of the target nucleic acid and as low as 0% or more over the remainder. In such a case, the targeting sequence can be considered to be 10 nucleotides in length. In some cases, the percent complementarity between the targeting sequence of the targeting segment and the target site of the target nucleic acid is 100% over the 11 contiguous 5′-most nucleotides of the target site of the target nucleic acid and as low as 0% or more over the remainder. In such a case, the targeting sequence can be considered to be 11 nucleotides in length. In some cases, the percent complementarity between the targeting sequence of the targeting segment and the target site of the target nucleic acid is 100% over the 12 contiguous 5′-most nucleotides of the target site of the target nucleic acid and as low as 0% or more over the remainder. In such a case, the targeting sequence can be considered to be 12 nucleotides in length. In some cases, the percent complementarity between the targeting sequence of the targeting segment and the target site of the target nucleic acid is 100% over the 13 contiguous 5′-most nucleotides of the target site of the target nucleic acid and as low as 0% or more over the remainder. In such a case, the targeting sequence can be considered to be 13 nucleotides in length. In some cases, the percent complementarity between the targeting sequence of the targeting segment and the target site of the target nucleic acid is 100% over the 14 contiguous 5′-most nucleotides of the target site of the target nucleic acid and as low as 0% or more over the remainder. In such a case, the targeting sequence can be considered to be 14 nucleotides in length.

[0212] Second Segment: Protein-Binding Segment

[0213] The protein-binding segment of a subject Cas9 guide RNA interacts with a Cas9 protein. The Cas9 guide RNA guides the bound Cas9 protein to a specific nucleotide sequence within target nucleic acid via the above mentioned targeting segment. The protein-binding segment of a Cas9 guide RNA comprises two stretches of nucleotides that are complementary to one another and hybridize to form a double stranded RNA duplex (dsRNA duplex). Thus, the protein-binding segment includes a dsRNA duplex. In some cases, the protein-binding segment also includes stem loop 1 (the “nexus”) of a Cas9 guide RNA (e.g., see FIG. 31). For example, in some cases, the activator of a Cas9 guide RNA (dgRNA or sgRNA) includes (i) a duplex forming segment that contributes to the dsRNA duplex of the protein-binding segment; and (ii) nucleotides 3′ of the duplex forming segment, e.g., that form stem loop 1 (the “nexus”). For example, in some cases, the protein-binding segment includes stem loop 1 (the “nexus”) of a Cas9 guide RNA. In some cases, the protein-binding segment includes 5 or more nucleotides (nt) (e.g., 6 or more, 7 or more, 8 or more, 9 or more, 10 or more, 11 or more, 12 or more, 15 or more, 20 or more, 30 or more, 40 or more, 50 or more, 60 or more, 70 or more, 75 or more, or 80 or more nt) 3′ of the dsRNA duplex (where 3′ is relative to the duplex-forming segment of the activator sequence).

[0214] The dsRNA duplex of the guide RNA (sgRNA or dgRNA) that forms between the activator and targeter is sometimes referred to herein as the “stem loop”. In addition, the activator (activator RNA, tracrRNA) of many naturally existing Cas9 guide RNAs (e.g., S. pygogenes guide RNAs) has 3 stem loops (3 hairpins) that are 3′ of the duplex-forming segment of the activator. The closest stem loop to the duplex-forming segment of the activator (3′ of the duplex forming segment) is called “stem loop 1” (and is also referred to herein as the “nexus”); the next stem loop is called “stem loop 2” (and is also referred to herein as the “hairpin 1”); and the next stem loop is called “stem loop 3” (and is also referred to herein as the “hairpin 2”). For example, see FIG. 31 for clarification of the nomenclature.

[0215] The term “truncated guide RNA”, as used herein, refers to a Cas9 guide RNA (single guide or dual guide) that has the nexus (“stem loop 1”), but is missing one or both of stem loops 2 and 3. Thus, a “truncated guide RNA” is truncated from the 3′ end of the activator and can have: (i) stem loop 1 only; (ii) stem loop 1 plus stem loop 2; or (iii) stem loop 1 plus stem loop 3. In some cases, a guide RNA (e.g., some naturally existing guide RNAs) have only one stem loop 3′ of the nexus (“stem loop 1”) and thus for purposes herein, such guide RNAs are referred to herein as having a nexus (“stem loop 1”) and a “stem loop 2/3” (or “hairpin 1/2”). For more information regarding guide RNAs, see Briner et al., Mol Cell. 2014 Oct. 23; 56(2):333-9, which is hereby incorporated by reference in its entirety.

[0216] Thus, the term “truncated guide RNA”, as used herein, refers to a Cas9 guide RNA (single guide or dual guide) that does not include one or both of: stem loop 2 and stem loop 3. In some cases, a Cas9 guide RNA (sgRNA or dgRNA) (a truncated Cas9 guide RNA) has stem loop 1, but does not have stem loop 2 and does not have stem loop 3. In some cases, a Cas9 guide RNA (sgRNA or dgRNA) (a truncated Cas9 guide RNA) has stem loop 1 and stem loop 2, but does not have stem loop 3. In some cases, a Cas9 guide RNA (sgRNA or dgRNA) (a truncated Cas9 guide RNA) has stem loop 1 and stem loop 3, but does not have stem loop 2. For example, in some cases, a Cas9 guide RNA (sgRNA or dgRNA) (a truncated Cas9 guide RNA) has stem loop 1, but does not have at least one of: stem loop 2 and stem loop 3. In some cases, a Cas9 guide RNA (sgRNA or dgRNA) (e.g., a full length Cas9 guide RNA) has stem loops 1, 2, and 3.

[0217] Thus, in some cases, an activator (of a Cas9 guide RNA) has stem loop 1, but does not have stem loop 2 and does not have stem loop 3. In some cases, an activator (of a Cas9 guide RNA) has stem loop 1 and stem loop 2, but does not have stem loop 3. In some cases, an activator (of a Cas9 guide RNA) has stem loop 1 and stem loop 3, but does not have stem loop 2. In some cases, an activator (of a Cas9 guide RNA) has stem loops 1, 2, and 3. For example, in some cases, an activator (of a Cas9 guide RNA) has stem loop 1, but does not have at least one of: stem loop 2 and stem loop 3.

[0218] In some cases, the activator (e.g., tracr sequence) of a Cas9 guide RNA (dgRNA or sgRNA) includes (i) a duplex forming segment that contributes to the dsRNA duplex of the protein-binding segment; and (ii) nucleotides 3′ of the duplex forming segment (and therefore the Cas9 guide RNA includes (ii)). In some cases, the additional nucleotides 3′ of the duplex forming segment form stem loop 1. In some cases, the activator (e.g., tracr sequence) of a Cas9 guide RNA (dgRNA or sgRNA) includes (i) a duplex forming segment that contributes to the dsRNA duplex of the protein-binding segment; and (ii) 5 or more nucleotides (e.g., 6 or more, 7 or more, 8 or more, 9 or more, 10 or more, 11 or more, 12 or more, 13 or more, 14 or more, 15 or more, 20 or more, 25 or more, 30 or more, 35 or more, 40 or more, 45 or more, 50 or more, 60 or more, 70 or more, or 75 or more nucleotides) 3′ of the duplex forming segment (and therefore the Cas9 guide RNA includes (ii)). In some cases, the activator of a Cas9 guide RNA (dgRNA or sgRNA) includes (i) a duplex forming segment that contributes to the dsRNA duplex of the protein-binding segment; and (ii) 5 or more nucleotides (e.g., 6 or more, 7 or more, 8 or more, 9 or more, 10 or more, 11 or more, 12 or more, 13 or more, 14 or more, 15 or more, 20 or more, 25 or more, 30 or more, 35 or more, 40 or more, 45 or more, 50 or more, 60 or more, 70 or more, or 75 or more nucleotides) 3′ of the duplex forming segment (and therefore the Cas9 guide RNA includes (ii)).

[0219] In some cases, the activator (e.g., tracr sequence) of a Cas9 guide RNA (dgRNA or sgRNA) includes (i) a duplex forming segment that contributes to the dsRNA duplex of the protein-binding segment; and (ii) a stretch of nucleotides (e.g., referred to herein as a 3′ tail) 3′ of the duplex forming segment (and therefore the Cas9 guide RNA includes (ii)). In some cases, the stretch of nucleotides 3′ of the duplex forming segment has a length in a range of from 5 to 200 nucleotides (nt) (e.g., from 5 to 150 nt, from 5 to 130 nt, from 5 to 120 nt, from 5 to 100 nt, from 5 to 80 nt, from 10 to 200 nt, from 10 to 150 nt, from 10 to 130 nt, from 10 to 120 nt, from 10 to 100 nt, from 10 to 80 nt, from 12 to 200 nt, from 12 to 150 nt, from 12 to 130 nt, from 12 to 120 nt, from 12 to 100 nt, from 12 to 80 nt, from 15 to 200 nt, from 15 to 150 nt, from 15 to 130 nt, from 15 to 120 nt, from 15 to 100 nt, from 15 to 80 nt, from 20 to 200 nt, from 20 to 150 nt, from 20 to 130 nt, from 20 to 120 nt, from 20 to 100 nt, from 20 to 80 nt, from 30 to 200 nt, from 30 to 150 nt, from 30 to 130 nt, from 30 to 120 nt, from 30 to 100 nt, or from 30 to 80 nt).

[0220] In some embodiments, the duplex-forming segment of the activator is 60% or more identical to one of the activator (tracrRNA) molecules set forth in SEQ ID NOs:431-562, and 1535-1544, or a complement thereof, over a stretch of 8 or more contiguous nucleotides (e.g., 8 or more contiguous nucleotides, 10 or more contiguous nucleotides, 12 or more contiguous nucleotides, 15 or more contiguous nucleotides, or 20 or more contiguous nucleotides). For example, the duplex-forming segment of the activator (or the DNA encoding the duplex-forming segment of the activator) can be 65% or more identical to one of the tracrRNA sequences set forth in SEQ ID NOs:431-562, and 1535-1544, or a complement thereof, over a stretch of 8 or more contiguous nucleotides (e.g., 8 or more contiguous nucleotides, 10 or more contiguous nucleotides, 12 or more contiguous nucleotides, 15 or more contiguous nucleotides, or 20 or more contiguous nucleotides). The duplex-forming segment of the activator (or the DNA encoding the duplex-forming segment of the activator) can be 70% or more identical to one of the tracrRNA sequences set forth in SEQ ID NOs:431-562, and 1535-1544, or a complement thereof, over a stretch of 8 or more contiguous nucleotides (e.g., 8 or more contiguous nucleotides, 10 or more contiguous nucleotides, 12 or more contiguous nucleotides, 15 or more contiguous nucleotides, or 20 or more contiguous nucleotides). The duplex-forming segment of the activator (or the DNA encoding the duplex-forming segment of the activator) can be 75% or more identical to one of the tracrRNA sequences set forth in SEQ ID NOs:431-562, and 1535-1544, or a complement thereof, over a stretch of 8 or more contiguous nucleotides (e.g., 8 or more contiguous nucleotides, 10 or more contiguous nucleotides, 12 or more contiguous nucleotides, 15 or more contiguous nucleotides, or 20 or more contiguous nucleotides). The duplex-forming segment of the activator (or the DNA encoding the duplex-forming segment of the activator) can be 80% or more identical to one of the tracrRNA sequences set forth in SEQ ID NOs:431-562, and 1535-1544, or a complement thereof, over a stretch of 8 or more contiguous nucleotides (e.g., 8 or more contiguous nucleotides, 10 or more contiguous nucleotides, 12 or more contiguous nucleotides, 15 or more contiguous nucleotides, or 20 or more contiguous nucleotides). The duplex-forming segment of the activator (or the DNA encoding the duplex-forming segment of the activator) can be 85% or more identical to one of the tracrRNA sequences set forth in SEQ ID NOs:431-562, and 1535-1544, or a complement thereof, over a stretch of 8 or more contiguous nucleotides (e.g., 8 or more contiguous nucleotides, 10 or more contiguous nucleotides, 12 or more contiguous nucleotides, 15 or more contiguous nucleotides, or 20 or more contiguous nucleotides). The duplex-forming segment of the activator (or the DNA encoding the duplex-forming segment of the activator) can be 90% or more identical to one of the tracrRNA sequences set forth in SEQ ID NOs:431-562, and 1535-1544, or a complement thereof, over a stretch of 8 or more contiguous nucleotides (e.g., 8 or more contiguous nucleotides, 10 or more contiguous nucleotides, 12 or more contiguous nucleotides, 15 or more contiguous nucleotides, or 20 or more contiguous nucleotides). The duplex-forming segment of the activator (or the DNA encoding the duplex-forming segment of the activator) can be 95% or more identical to one of the tracrRNA sequences set forth in SEQ ID NOs:431-562, and 1535-1544, or a complement thereof, over a stretch of 8 or more contiguous nucleotides (e.g., 8 or more contiguous nucleotides, 10 or more contiguous nucleotides, 12 or more contiguous nucleotides, 15 or more contiguous nucleotides, or 20 or more contiguous nucleotides). The duplex-forming segment of the activator (or the DNA encoding the duplex-forming segment of the activator) can be 98% or more identical to one of the tracrRNA sequences set forth in SEQ ID NOs:431-562, and 1535-1544, or a complement thereof, over a stretch of 8 or more contiguous nucleotides (e.g., 8 or more contiguous nucleotides, 10 or more contiguous nucleotides, 12 or more contiguous nucleotides, 15 or more contiguous nucleotides, or 20 or more contiguous nucleotides). The duplex-forming segment of the activator (or the DNA encoding the duplex-forming segment of the activator) can be 99% or more identical to one of the tracrRNA sequences set forth in SEQ ID NOs:431-562, and 1535-1544, or a complement thereof, over a stretch of 8 or more contiguous nucleotides (e.g., 8 or more contiguous nucleotides, 10 or more contiguous nucleotides, 12 or more contiguous nucleotides, 15 or more contiguous nucleotides, or 20 or more contiguous nucleotides). The duplex-forming segment of the activator (or the DNA encoding the duplex-forming segment of the activator) can be 100% identical to one of the tracrRNA sequences set forth in SEQ ID NOs:431-562, and 1535-1544, or a complement thereof, over a stretch of 8 or more contiguous nucleotides (e.g., 8 or more contiguous nucleotides, 10 or more contiguous nucleotides, 12 or more contiguous nucleotides, 15 or more contiguous nucleotides, or 20 or more contiguous nucleotides).

[0221] In some embodiments, the duplex-forming segment of the targeter is 60% or more identical to one of the targeter (crRNA) sequences set forth in SEQ ID NOs:563-679, or a complement thereof, over a stretch of 8 or more contiguous nucleotides (e.g., 8 or more contiguous nucleotides, 10 or more contiguous nucleotides, 12 or more contiguous nucleotides, 15 contig or more contiguous nucleotides, or 20 or more contiguous nucleotides). For example, the duplex-forming segment of the targeter (or the DNA encoding the duplex-forming segment of the targeter) can be 65% or more identical to one of the crRNA sequences set forth in SEQ ID NOs:563-679, or a complement thereof, over a stretch of 8 or more contiguous nucleotides (e.g., 8 or more contiguous nucleotides, 10 or more contiguous nucleotides, 12 or more contiguous nucleotides, 15 or more contiguous nucleotides, or 20 or more contiguous nucleotides). The duplex-forming segment of the targeter (or the DNA encoding the duplex-forming segment of the targeter) can be 70% or more identical to one of the crRNA sequences set forth in SEQ ID NOs:563-679, or a complement thereof, over a stretch of 8 or more contiguous nucleotides (e.g., 8 or more contiguous nucleotides, 10 or more contiguous nucleotides, 12 or more contiguous nucleotides, 15 or more contiguous nucleotides, or 20 or more contiguous nucleotides). The duplex-forming segment of the targeter (or the DNA encoding the duplex-forming segment of the targeter) can be 75% or more identical to one of the crRNA sequences set forth in SEQ ID NOs:563-679, or a complement thereof, over a stretch of 8 or more contiguous nucleotides (e.g., 8 or more contiguous nucleotides, 10 or more contiguous nucleotides, 12 or more contiguous nucleotides, 15 or more contiguous nucleotides, or 20 or more contiguous nucleotides). The duplex-forming segment of the targeter (or the DNA encoding the duplex-forming segment of the targeter) can be 80% or more identical to one of the crRNA sequences set forth in SEQ ID NOs:563-679, or a complement thereof, over a stretch of 8 or more contiguous nucleotides (e.g., 8 or more contiguous nucleotides, 10 or more contiguous nucleotides, 12 or more contiguous nucleotides, 15 or more contiguous nucleotides, or 20 or more contiguous nucleotides). The duplex-forming segment of the targeter (or the DNA encoding the duplex-forming segment of the targeter) can be 85% or more identical to one of the crRNA sequences set forth in SEQ ID NOs:563-679, or a complement thereof, over a stretch of 8 or more contiguous nucleotides (e.g., 8 or more contiguous nucleotides, 10 or more contiguous nucleotides, 12 or more contiguous nucleotides, 15 or more contiguous nucleotides, or 20 or more contiguous nucleotides). The duplex-forming segment of the targeter (or the DNA encoding the duplex-forming segment of the targeter) can be 90% or more identical to one of the crRNA sequences set forth in SEQ ID NOs:563-679, or a complement thereof, over a stretch of 8 or more contiguous nucleotides (e.g., 8 or more contiguous nucleotides, 10 or more contiguous nucleotides, 12 or more contiguous nucleotides, 15 or more contiguous nucleotides, or 20 or more contiguous nucleotides). The duplex-forming segment of the targeter (or the DNA encoding the duplex-forming segment of the targeter) can be 95% or more identical to one of the crRNA sequences set forth in SEQ ID NOs:563-679, or a complement thereof, over a stretch of 8 or more contiguous nucleotides (e.g., 8 or more contiguous nucleotides, 10 or more contiguous nucleotides, 12 or more contiguous nucleotides, 15 or more contiguous nucleotides, or 20 or more contiguous nucleotides). The duplex-forming segment of the targeter (or the DNA encoding the duplex-forming segment of the targeter) can be 98% or more identical to one of the crRNA sequences set forth in SEQ ID NOs:563-679, or a complement thereof, over a stretch of 8 or more contiguous nucleotides (e.g., 8 or more contiguous nucleotides, 10 or more contiguous nucleotides, 12 or more contiguous nucleotides, 15 or more contiguous nucleotides, or 20 or more contiguous nucleotides). The duplex-forming segment of the targeter (or the DNA encoding the duplex-forming segment of the targeter) can be 99% or more identical to one of the crRNA sequences set forth in SEQ ID NOs:563-679, or a complement thereof, over a stretch of 8 or more contiguous nucleotides (e.g., 8 or more contiguous nucleotides, 10 or more contiguous nucleotides, 12 or more contiguous nucleotides, 15 or more contiguous nucleotides, or 20 or more contiguous nucleotides). The duplex-forming segment of the targeter (or the DNA encoding the duplex-forming segment of the targeter) can be 100% identical to one of the crRNA sequences set forth in SEQ ID NOs:563-679, or a complement thereof, over a stretch of 8 or more contiguous nucleotides (e.g., 8 or more contiguous nucleotides, 10 or more contiguous nucleotides, 12 or more contiguous nucleotides, 15 or more contiguous nucleotides, or 20 or more contiguous nucleotides).

[0222] A dual guide RNA can be designed to allow for controlled (i.e., conditional) binding of a targeter with an activator. Because a Cas9 dual guide RNA is not functional unless both the activator and the targeter are bound in a functional complex with Cas9, a dual guide RNA can be inducible (e.g., drug inducible) by rendering the binding between the activator and the targeter to be inducible. As one non-limiting example, RNA aptamers can be used to regulate (i.e., control) the binding of the activator with the targeter. Accordingly, the activator and/or the targeter can include an RNA aptamer sequence.

[0223] Aptamers (e.g., RNA aptamers) are known in the art and are generally a synthetic version of a riboswitch. The terms “RNA aptamer” and “riboswitch” are used interchangeably herein to encompass both synthetic and natural nucleic acid sequences that provide for inducible regulation of the structure (and therefore the availability of specific sequences) of the nucleic acid molecule (e.g., RNA, DNA/RNA hybrid, etc.) of which they are part. RNA aptamers usually comprise a sequence that folds into a particular structure (e.g., a hairpin), which specifically binds a particular drug (e.g., a small molecule). Binding of the drug causes a structural change in the folding of the RNA, which changes a feature of the nucleic acid of which the aptamer is a part. As non-limiting examples: (i) an activator with an aptamer may not be able to bind to the cognate targeter unless the aptamer is bound by the appropriate drug; (ii) a targeter with an aptamer may not be able to bind to the cognate activator unless the aptamer is bound by the appropriate drug; and (iii) a targeter and an activator, each comprising a different aptamer that binds a different drug, may not be able to bind to each other unless both drugs are present. As illustrated by these examples, a Cas9 dual guide RNA can be designed to be inducible.

[0224] Examples of aptamers and riboswitches can be found, for example, in: Nakamura et al., Genes Cells. 2012 May; 17(5):344-64; Vavalle et al., Future Cardiol. 2012 May; 8(3):371-82; Citartan et al., Biosens Bioelectron. 2012 Apr. 15; 34(1):1-11; and Liberman et al., Wiley Interdiscip Rev RNA. 2012 May-June; 3(3):369-84; all of which are herein incorporated by reference in their entirety.

[0225] As noted above, a Cas9 single guide RNA comprises two stretches of nucleotides (a “targeter” and an “activator”) that are complementary to one another, hybridize to form the double stranded RNA duplex (dsRNA duplex) of the protein-binding segment (thus resulting in a stem-loop structure), and are covalently linked, e.g., by a linker of intervening nucleotides (“linker nucleotides”). The linker of a Cas9 single guide RNA can have a length of from 3 nucleotides to 100 nucleotides. For example, the linker can have a length of from 3 nucleotides (nt) to 90 nt, from 3 nucleotides (nt) to 80 nt, from 3 nucleotides (nt) to 70 nt, from 3 nucleotides (nt) to 60 nt, from 3 nucleotides (nt) to 50 nt, from 3 nucleotides (nt) to 40 nt, from 3 nucleotides (nt) to 30 nt, from 3 nucleotides (nt) to 20 nt or from 3 nucleotides (nt) to 10 nt. For example, the linker can have a length of from 3 nt to 5 nt, from 5 nt to 10 nt, from 10 nt to 15 nt, from 15 nt to 20 nt, from 20 nt to 25 nt, from 25 nt to 30 nt, from 30 nt to 35 nt, from 35 nt to 40 nt, from 40 nt to 50 nt, from 50 nt to 60 nt, from 60 nt to 70 nt, from 70 nt to 80 nt, from 80 nt to 90 nt, or from 90 nt to 100 nt. In some embodiments, the linker of a Cas9 single guide RNA is 4 nt.

[0226] In some embodiments, one of the two complementary stretches of nucleotides (that hybridize to form the dsRNA duplex of the protein-binding segment) of the Cas9 single guide RNA (or the DNA encoding the stretch) is 60% or more identical to one of the activator (tracrRNA) molecules set forth in SEQ ID NOs:431-562, and 1535-1544, or a complement thereof, over a stretch of 8 or more contiguous nucleotides (e.g., 8 or more contiguous nucleotides, 10 or more contiguous nucleotides, 12 or more contiguous nucleotides, 15 or more contiguous nucleotides, or 20 or more contiguous nucleotides). For example, one of the two complementary stretches of nucleotides of the Cas9 single guide RNA (or the DNA encoding the stretch) is 65% or more identical, 70% or more identical, 75% or more identical, 80% or more identical, 85% or more identical, 90% or more identical, 95% or more identical, 98% or more identical, 99% or more identical or 100% identical to one of the tracrRNA sequences set forth in SEQ ID NOs:431-562, and 1535-1544, or a complement thereof, over a stretch of 8 or more contiguous nucleotides (e.g., 8 or more contiguous nucleotides, 10 or more contiguous nucleotides, 12 or more contiguous nucleotides, 15 or more contiguous nucleotides, or 20 or more contiguous nucleotides).

[0227] In some embodiments, one of the two complementary stretches of nucleotides (that hybridize to form the dsRNA duplex of the protein-binding segment) of the Cas9 single guide RNA (or the DNA encoding the stretch) is 60% or more identical to one of the targeter (crRNA) sequences set forth in SEQ ID NOs:563-679, or a complement thereof, over a stretch of 8 or more contiguous nucleotides (e.g., 8 or more contiguous nucleotides, 10 or more contiguous nucleotides, 12 or more contiguous nucleotides, 15 or more contiguous nucleotides, or 20 or more contiguous nucleotides). For example, one of the two complementary stretches of nucleotides of the Cas9 single guide RNA (or the DNA encoding the stretch) is 65% or more identical, 70% or more identical, 75% or more identical, 80% or more identical, 85% or more identical, 90% or more identical, 95% or more identical, 98% or more identical, 99% or more identical or 100% identical to one of the crRNA sequences set forth in SEQ ID NOs:563-679, or a complement thereof, over a stretch of 8 or more contiguous nucleotides (e.g., 8 or more contiguous nucleotides, 10 or more contiguous nucleotides, 12 or more contiguous nucleotides, 15 or more contiguous nucleotides, or 20 or more contiguous nucleotides).

[0228] In some embodiments, one of the two complementary stretches of nucleotides (that hybridize to form the dsRNA duplex of the protein-binding segment) of the Cas9 single guide RNA (or the DNA encoding the stretch) is 60% or more identical to one of the targeter (crRNA) sequences or activator (tracrRNA) sequences set forth in SEQ ID NOs: 431-679, and 1535-1544, or a complement thereof, over a stretch of 8 or more contiguous nucleotides (e.g., 8 or more contiguous nucleotides, 10 or more contiguous nucleotides, 12 or more contiguous nucleotides, 15 or more contiguous nucleotides, or 20 or more contiguous nucleotides). For example, one of the two complementary stretches of nucleotides of the Cas9 single guide RNA (or the DNA encoding the stretch) can be 65% or more identical to one of the sequences set forth in SEQ ID NOs: 431-679, and 1535-1544, or a complement thereof, over a stretch of 8 or more contiguous nucleotides (e.g., 8 or more contiguous nucleotides, 10 or more contiguous nucleotides, 12 or more contiguous nucleotides, 15 or more contiguous nucleotides, or 20 or more contiguous nucleotides). One of the two complementary stretches of nucleotides of the Cas9 single guide RNA (or the DNA encoding the stretch) can be 70% or more identical to one of the sequences set forth in SEQ ID NOs: 431-679, and 1535-1544, or a complement thereof, over a stretch of 8 or more contiguous nucleotides (e.g., 8 or more contiguous nucleotides, 10 or more contiguous nucleotides, 12 or more contiguous nucleotides, 15 or more contiguous nucleotides, or 20 or more contiguous nucleotides). One of the two complementary stretches of nucleotides of the Cas9 single guide RNA (or the DNA encoding the stretch) can be 75% or more identical to one of the sequences set forth in SEQ ID NOs: 431-679, and 1535-1544, or a complement thereof, over a stretch of 8 or more contiguous nucleotides (e.g., 8 or more contiguous nucleotides, 10 or more contiguous nucleotides, 12 or more contiguous nucleotides, 15 or more contiguous nucleotides, or 20 or more contiguous nucleotides) One of the two complementary stretches of nucleotides of the Cas9 single guide RNA (or the DNA encoding the stretch) can be 80% or more identical to one of the sequences set forth in SEQ ID NOs: 431-679, and 1535-1544, or a complement thereof, over a stretch of 8 or more contiguous nucleotides (e.g., 8 or more contiguous nucleotides, 10 or more contiguous nucleotides, 12 or more contiguous nucleotides, 15 or more contiguous nucleotides, or 20 or more contiguous nucleotides). One of the two complementary stretches of nucleotides of the Cas9 single guide RNA (or the DNA encoding the stretch) can be 85% or more identical to one of the sequences set forth in SEQ ID NOs: 431-679, and 1535-1544, or a complement thereof, over a stretch of 8 or more contiguous nucleotides (e.g., 8 or more contiguous nucleotides, 10 or more contiguous nucleotides, 12 or more contiguous nucleotides, 15 or more contiguous nucleotides, or 20 or more contiguous nucleotides). One of the two complementary stretches of nucleotides of the Cas9 single guide RNA (or the DNA encoding the stretch) can be 90% or more identical to one of the sequences set forth in SEQ ID NOs: 431-679, and 1535-1544, or a complement thereof, over a stretch of 8 or more contiguous nucleotides (e.g., 8 or more contiguous nucleotides, 10 or more contiguous nucleotides, 12 or more contiguous nucleotides, 15 or more contiguous nucleotides, or 20 or more contiguous nucleotides). One of the two complementary stretches of nucleotides of the Cas9 single guide RNA (or the DNA encoding the stretch) can be 95% or more identical to one of the sequences set forth in SEQ ID NOs: 431-679, and 1535-1544, or a complement thereof, over a stretch of 8 or more contiguous nucleotides (e.g., 8 or more contiguous nucleotides, 10 or more contiguous nucleotides, 12 or more contiguous nucleotides, 15 or more contiguous nucleotides, or 20 or more contiguous nucleotides). One of the two complementary stretches of nucleotides of the Cas9 single guide RNA (or the DNA encoding the stretch) can be 98% or more identical to one of the sequences set forth in SEQ ID NOs: 431-679, and 1535-1544, or a complement thereof, over a stretch of 8 or more contiguous nucleotides (e.g., 8 or more contiguous nucleotides, 10 or more contiguous nucleotides, 12 or more contiguous nucleotides, 15 or more contiguous nucleotides, or 20 or more contiguous nucleotides). One of the two complementary stretches of nucleotides of the Cas9 single guide RNA (or the DNA encoding the stretch) can be 99% or more identical to one of the sequences set forth in SEQ ID NOs: 431-679, and 1535-1544, or a complement thereof, over a stretch of 8 or more contiguous nucleotides (e.g., 8 or more contiguous nucleotides, 10 or more contiguous nucleotides, 12 or more contiguous nucleotides, 15 or more contiguous nucleotides, or 20 or more contiguous nucleotides). One of the two complementary stretches of nucleotides of the Cas9 single guide RNA (or the DNA encoding the stretch) can be 100% identical to one of the sequences set forth in SEQ ID NOs: 431-679, and 1535-1544, or a complement thereof, over a stretch of 8 or more contiguous nucleotides (e.g., 8 or more contiguous nucleotides, 10 or more contiguous nucleotides, 12 or more contiguous nucleotides, 15 or more contiguous nucleotides, or 20 or more contiguous nucleotides).

[0229] Appropriate cognate pairs of targeters and activators can be routinely determined for SEQ ID NOs:431-679 and 1535-1544, by taking into account the species name and base-pairing (for the dsRNA duplex of the protein-binding domain). Any activator/targeter pair can be used as part of subject Cas9 dual guide RNA or as part of a subject Cas9 single guide RNA.

[0230] In some cases, an activator (e.g., a trRNA, trRNA-like molecule, etc.) of a Cas9 dual guide RNA (e.g., a dual guide RNA) or a Cas9 single guide RNA (e.g., a single guide RNA) includes a stretch of nucleotides with 60% or more sequence identity (e.g., 65% or more, 70% or more, 75% or more, 80% or more, 85% or more, 90% or more, 95% or more, 98% or more, or 100% sequence identity) with a naturally existing activator (tracrRNA) molecule. In some cases, an activator (e.g., a trRNA, trRNA-like molecule, etc.) of a Cas9 dual guide RNA (e.g., a dual guide RNA) or a Cas9 single guide RNA (e.g., a single guide RNA) includes a stretch of nucleotides with 60% or more sequence identity (e.g., 65% or more, 70% or more, 75% or more, 80% or more, 85% or more, 90% or more, 95% or more, 98% or more, or 100% sequence identity) with an activator (tracrRNA) molecule set forth in any one of SEQ ID NOs:431-562, and 1535-1544, or a complement thereof. In some cases, an activator (e.g., a trRNA, trRNA-like molecule, etc.) of a Cas9 dual guide RNA (e.g., a dual guide RNA) or a Cas9 single guide RNA (e.g., a single guide RNA) includes a stretch of nucleotides with 70% or more sequence identity with an activator (tracrRNA) molecule set forth in any one of SEQ ID NOs:431-562, and 1535-1544, or a complement thereof. In some cases, an activator (e.g., a trRNA, trRNA-like molecule, etc.) of a Cas9 dual guide RNA (e.g., a dual guide RNA) or a Cas9 single guide RNA (e.g., a single guide RNA) includes a stretch of nucleotides with 75% or more sequence identity with an activator (tracrRNA) molecule set forth in any one of SEQ ID NOs:431-562, and 1535-1544, or a complement thereof. In some cases, an activator (e.g., a trRNA, trRNA-like molecule, etc.) of a Cas9 dual guide RNA (e.g., a dual guide RNA) or a Cas9 single guide RNA (e.g., a single guide RNA) includes a stretch of nucleotides with 80% or more sequence identity with an activator (tracrRNA) molecule set forth in any one of SEQ ID NOs:431-562, and 1535-1544, or a complement thereof. In some cases, an activator (e.g., a trRNA, trRNA-like molecule, etc.) of a Cas9 dual guide RNA (e.g., a dual guide RNA) or a Cas9 single guide RNA (e.g., a single guide RNA) includes a stretch of nucleotides with 85% or more sequence identity with an activator (tracrRNA) molecule set forth in any one of SEQ ID NOs:431-562, and 1535-1544, or a complement thereof. In some cases, an activator (e.g., a trRNA, trRNA-like molecule, etc.) of a Cas9 dual guide RNA (e.g., a dual guide RNA) or a Cas9 single guide RNA (e.g., a single guide RNA) includes a stretch of nucleotides with 90% or more sequence identity with an activator (tracrRNA) molecule set forth in any one of SEQ ID NOs:431-562, and 1535-1544, or a complement thereof. In some cases, an activator (e.g., a trRNA, trRNA-like molecule, etc.) of a Cas9 dual guide RNA (e.g., a dual guide RNA) or a Cas9 single guide RNA (e.g., a single guide RNA) includes a stretch of nucleotides with 95% or more sequence identity with an activator (tracrRNA) molecule set forth in any one of SEQ ID NOs:431-562, and 1535-1544, or a complement thereof. In some cases, an activator (e.g., a trRNA, trRNA-like molecule, etc.) of a Cas9 dual guide RNA (e.g., a dual guide RNA) or a Cas9 single guide RNA (e.g., a single guide RNA) includes a stretch of nucleotides with 98% or more sequence identity with an activator (tracrRNA) molecule set forth in any one of SEQ ID NOs:431-562, and 1535-1544, or a complement thereof. In some cases, an activator (e.g., a trRNA, trRNA-like molecule, etc.) of a Cas9 dual guide RNA (e.g., a dual guide RNA) or a Cas9 single guide RNA (e.g., a single guide RNA) includes a stretch of nucleotides with 100% sequence identity with an activator (tracrRNA) molecule set forth in any one of SEQ ID NOs:431-562, and 1535-1544, or a complement thereof.

[0231] In some cases, an activator (e.g., a trRNA, trRNA-like molecule, etc.) of a Cas9 dual guide RNA (e.g., a dual guide RNA) or a Cas9 single guide RNA (e.g., a single guide RNA) includes a stretch of nucleotides with 60% or more sequence identity (e.g., 65% or more, 70% or more, 75% or more, 80% or more, 85% or more, 90% or more, 95% or more, 98% or more, or 100% sequence identity) with a nucleotide sequence set forth in any one of SEQ ID NOs:431-679, and 1535-1544, or a complement thereof. In some cases, an activator (e.g., a trRNA, trRNA-like molecule, etc.) of a Cas9 dual guide RNA (e.g., a dual guide RNA) or a Cas9 single guide RNA (e.g., a single guide RNA) includes a stretch of nucleotides with 70% or more sequence identity with an activator (tracrRNA) molecule set forth in any one of SEQ ID NOs:431-562, and 1535-1544, or a complement thereof. In some cases, an activator (e.g., a trRNA, trRNA-like molecule, etc.) of a Cas9 dual guide RNA (e.g., a dual guide RNA) or a Cas9 single guide RNA (e.g., a single guide RNA) includes a stretch of nucleotides with 75% or more sequence identity with an activator (tracrRNA) molecule set forth in any one of SEQ ID NOs:431-562, and 1535-1544, or a complement thereof. In some cases, an activator (e.g., a trRNA, trRNA-like molecule, etc.) of a Cas9 dual guide RNA (e.g., a dual guide RNA) or a Cas9 single guide RNA (e.g., a single guide RNA) includes a stretch of nucleotides with 80% or more sequence identity with an activator (tracrRNA) molecule set forth in any one of SEQ ID NOs:431-562, and 1535-1544, or a complement thereof. In some cases, an activator (e.g., a trRNA, trRNA-like molecule, etc.) of a Cas9 dual guide RNA (e.g., a dual guide RNA) or a Cas9 single guide RNA (e.g., a single guide RNA) includes a stretch of nucleotides with 85% or more sequence identity with an activator (tracrRNA) molecule set forth in any one of SEQ ID NOs:431-562, and 1535-1544, or a complement thereof. In some cases, an activator (e.g., a trRNA, trRNA-like molecule, etc.) of a Cas9 dual guide RNA (e.g., a dual guide RNA) or a Cas9 single guide RNA (e.g., a single guide RNA) includes a stretch of nucleotides with 90% or more sequence identity with an activator (tracrRNA) molecule set forth in any one of SEQ ID NOs:431-562, and 1535-1544, or a complement thereof. In some cases, an activator (e.g., a trRNA, trRNA-like molecule, etc.) of a Cas9 dual guide RNA (e.g., a dual guide RNA) or a Cas9 single guide RNA (e.g., a single guide RNA) includes a stretch of nucleotides with 95% or more sequence identity with an activator (tracrRNA) molecule set forth in any one of SEQ ID NOs:431-562, and 1535-1544, or a complement thereof. In some cases, an activator (e.g., a trRNA, trRNA-like molecule, etc.) of a Cas9 dual guide RNA (e.g., a dual guide RNA) or a Cas9 single guide RNA (e.g., a single guide RNA) includes a stretch of nucleotides with 98% or more sequence identity with an activator (tracrRNA) molecule set forth in any one of SEQ ID NOs:431-562, and 1535-1544, or a complement thereof. In some cases, an activator (e.g., a trRNA, trRNA-like molecule, etc.) of a Cas9 dual guide RNA (e.g., a dual guide RNA) or a Cas9 single guide RNA (e.g., a single guide RNA) includes a stretch of nucleotides with 100% sequence identity with an activator (tracrRNA) molecule set forth in any one of SEQ ID NOs:431-562, and 1535-1544, or a complement thereof.

[0232] In some cases, an activator (e.g., a trRNA, trRNA-like molecule, etc.) of a Cas9 dual guide RNA (e.g., a dual guide RNA) or a Cas9 single guide RNA (e.g., a single guide RNA) includes 30 or more nucleotides (nt) (e.g., 40 or more, 50 or more, 60 or more, 70 or more, 75 or more nt). In some cases, an activator (e.g., a trRNA, trRNA-like molecule, etc.) of a Cas9 dual guide RNA (e.g., a dual guide RNA) or a Cas9 single guide RNA (e.g., a single guide RNA) has a length in a range of from 25 to 300 nucleotides (nt) (e.g., 30 to 300 nt, 40 to 300 nt, 50 to 300 nt, 60 to 300 nt, 65 to 300 nt, 70 to 300 nt, 75 to 300 nt, 30 to 200 nt, 40 to 200 nt, 50 to 200 nt, 60 to 200 nt, 65 to 200 nt, 70 to 200 nt, 75 to 200 nt, 30 to 150 nt, 40 to 150 nt, 50 to 150 nt, 60 to 150 nt, 65 to 150 nt, 70 to 150 nt, 75 to 150 nt, 30 to 100 nt, 40 to 100 nt, 50 to 100 nt, 60 to 100 nt, 65 to 100 nt, 70 to 100 nt, 75 to 100 nt, 30 to 75 nt, 30 to 65 nt, 30 to 50 nt, or 30 to 40 nt).

[0233] In some cases, the protein-binding segment has a length of from 10 nucleotides to 300 nucleotides. Also with regard to both a subject Cas9 single guide RNA and to a subject Cas9 dual guide RNA, the dsRNA duplex of the protein-binding segment can have a length from about 6 base pairs (bp) to about 50 bp. For example, the dsRNA duplex of the protein-binding segment can have a length from about 6 bp to about 40 bp, from about 6 bp to about 30 bp, from about 6 bp to about 25 bp, from about 6 bp to about 20 bp, from about 6 bp to about 15 bp, from about 8 bp to about 40 bp, from about 8 bp to about 30bp, from about 8 bp to about 25 bp, from about 8 bp to about 20 bp or from about 8 bp to about 15 bp. For example, the dsRNA duplex of the protein-binding segment can have a length from about from about 8 bp to about 10 bp, from about 10 bp to about 15 bp, from about 15 bp to about 18 bp, from about 18 bp to about 20 bp, from about 20 bp to about 25 bp, from about 25 bp to about 30 bp, from about 30 bp to about 35 bp, from about 35 bp to about 40 bp, or from about 40 bp to about 50 bp. In some embodiments, the dsRNA duplex of the protein-binding segment has a length of 36 base pairs. The percent complementarity between the nucleotide sequences that hybridize to form the dsRNA duplex of the protein-binding segment can be 60% or more. For example, the percent complementarity between the nucleotide sequences that hybridize to form the dsRNA duplex of the protein-binding segment can be 65% or more, 70% or more, 75% or more, 80% or more, 85% or more, 90% or more, 95% or more, 98% or more, or 99% or more. In some cases, the dsRNA duplex of the protein binding segment includes a “bulge”, e.g., a region of non-complementarity (which, e.g., can result in two (or more) sub-regions of complementarity separated by one region (or more) of non-complementarity). In some cases, the percent complementarity between the nucleotide sequences that hybridize to form the dsRNA duplex of the protein-binding segment is 100%.

[0234] In some embodiments, a suitable Cas9 guide RNA comprises two separate molecules (an activator and a targeter). In some cases, the first of the two separate molecules (the activator) comprises a nucleotide sequence having 60% or more (e.g., 65% or more, 70% or more, 75% or more, 80% or more, 85% or more, 90% or more, 95% or more, 98% or more, 99% or more, or 100%) nucleotide sequence identity over a stretch of 8 or more contiguous nucleotides (e.g., 8 or more contiguous nucleotides, 10 or more contiguous nucleotides, 12 or more contiguous nucleotides, 15 or more contiguous nucleotides, or 20 or more contiguous nucleotides) to any one of the nucleotide sequences set forth in SEQ ID NOs:431-562, and 1535-1544, or a complement thereof. In some cases, the second of the two separate molecules (the targeter) comprises a nucleotide sequence having 60% or more (e.g., 65% or more, 70% or more, 75% or more, 80% or more, 85% or more, 90% or more, 95% or more, 98% or more, 99% or more, or 100%) nucleotide sequence identity over a stretch of 8 or more contiguous nucleotides (e.g., 8 or more contiguous nucleotides, 10 or more contiguous nucleotides, 12 or more contiguous nucleotides, 15 or more contiguous nucleotides, or 20 or more contiguous nucleotides) to any one of the nucleotide sequences set forth in SEQ ID NOs:563-679, or a complement thereof.

[0235] In some embodiments, a suitable Cas9 guide RNA is a single RNA polynucleotide and comprises a first nucleotide sequence having 60% or more (e.g., 65% or more, 70% or more, 75% or more, 80% or more, 85% or more, 90% or more, 95% or more, 98% or more, 99% or more, or 100%) nucleotide sequence identity over a stretch of 8 or more contiguous nucleotides (e.g., 8 or more contiguous nucleotides, 10 or more contiguous nucleotides, 12 or more contiguous nucleotides, 15 or more contiguous nucleotides, or 20 or more contiguous nucleotides) to any one of the nucleotide sequences set forth in SEQ ID NOs:431-562, and 1535-1544, and a second nucleotide sequence having 60% or more (e.g., 65% or more, 70% or more, 75% or more, 80% or more, 85% or more, 90% or more, 95% or more, 98% or more, 99% or more, or 100%) nucleotide sequence identity over a stretch of 8 or more contiguous nucleotides (e.g., 8 or more contiguous nucleotides, 10 or more contiguous nucleotides, 12 or more contiguous nucleotides, 15 or more contiguous nucleotides, or 20 or more contiguous nucleotides) to any one of the nucleotide sequences set forth in SEQ ID NOs: 463-679.

[0236] In some embodiments, the targeter comprises the sequence 5′GUUUUAGAGCUA-3′ (SEQ ID NO:679) linked at its 5′ end to a stretch of nucleotides that are complementary to a target nucleic acid. In some embodiments, the activator comprises the sequence

(SEQ ID NO: 397)
5′-UAGCAAGUUAAAAUAAGGCUAGUCCG-3′.

[0237] In some embodiments, a Cas9 guide RNA comprises the sequence 5′-GUUUUAGAGCUA-linker-UAGCAAGUUAAAAUAAGGCUAGUCCG-3′ (SEQ ID NO:680) linked at its 5′ end to a stretch of nucleotides that are complementary to a target nucleic acid (where “linker” denotes any a linker nucleotide sequence that can comprise any nucleotide sequence). Illustrative examples of Cas9 single guide RNAs include those set forth in SEQ ID NOs: 680-682.

[0238] Hybrid Cas9 Guide RNA

[0239] As noted above, in some cases, a Cas9 guide RNA (sgRNA or dgRNA) is a DNA/RNA hybrid guide RNA (hybrid guide nucleic acid). In such cases, the protein-binding segment of the Cas9 guide RNA is RNA and forms an RNA duplex. Thus, the duplex-forming segments of the activator and the targeter can be RNA. However, the targeting segment of a Cas9 guide RNA can be DNA. Thus, the “targeter” can be a hybrid molecule (e.g, the targeting segment can be DNA and the duplex-forming segment can be RNA). In such cases, the duplex-forming segment of the “activator” can be RNA (e.g., in order to form an RNA-duplex with the duplex-forming segment of the targeter molecule), while nucleotides of the “activator” that are outside of the duplex-forming segment can be DNA (in which case the activator molecule is a hybrid DNA/RNA molecule) or can be RNA (in which case the activator molecule is RNA). For example, the targeting segment can be DNA, the duplex-forming segments (which make up the protein-binding segment) can be RNA, and nucleotides outside of the targeting and duplex-forming segments can be RNA or DNA. The “targeter” can also be referred to as a “targeter RNA” (even though in some cases a targeter RNA can have deoxyribonucleotides and/or other modifications) and the “activator” can be referred to as an “activator RNA” (even though in some cases a targeter RNA can have deoxyribonucleotides and/or other modifications).

[0240] A DNA/RNA hybrid guide nucleic can be useful in some cases, for example, when a target nucleic acid is an RNA. Cas9 normally associates with a Cas9 guide RNA that hybridizes with a target DNA, thus forming a DNA-RNA duplex at the target site. Therefore, when the target nucleic acid is an RNA, it is sometimes advantageous to recapitulate a DNA-RNA duplex at the target site by using a targeting segment (of the Cas9 guide RNA) that is DNA instead of RNA. In some cases, hybrid Cas9 guide RNAs can bias Cas9 binding to single stranded target nucleic acids relative to double stranded target nucleic acids.

[0241] Stability Control Sequence (e.g., Transcriptional Terminator Segment)

[0242] In some embodiments, a Cas9 guide RNA comprises a stability control sequence. A stability control sequence influences the stability of a nucleic acid (e.g., a Cas9 guide RNA, a targeter, an activator, etc.). One example of a suitable stability control sequence for use with an RNA is a transcriptional terminator segment (i.e., a transcription termination sequence). A transcriptional terminator segment of a subject Cas9 guide RNA can have a total length of from about 10 nucleotides to about 100 nucleotides, e.g., from about 10 nucleotides (nt) to about 20 nt, from about 20 nt to about 30 nt, from about 30 nt to about 40 nt, from about 40 nt to about 50 nt, from about 50 nt to about 60 nt, from about 60 nt to about 70 nt, from about 70 nt to about 80 nt, from about 80 nt to about 90 nt, or from about 90 nt to about 100 nt. For example, the transcriptional terminator segment can have a length of from about 15 nucleotides (nt) to about 80 nt, from about 15 nt to about 50 nt, from about 15 nt to about 40 nt, from about 15 nt to about 30 nt or from about 15 nt to about 25 nt.

[0243] In some cases, the transcription termination sequence is one that is functional in a eukaryotic cell. In some cases, the transcription termination sequence is one that is functional in a prokaryotic cell.

[0244] Non-limiting examples of nucleotide sequences that can be included in a stability control sequence (e.g., transcriptional termination segment, or in any segment of the Cas9 guide RNA to provide for increased stability) include sequences set forth in SEQ ID NO:683-696 and, for example, 5′-UAAUCCCACAGCCGCCAGUUCCGCUGGCGGCAUUUU-5′ (SEQ ID NO: 1349) (a Rho-independent trp termination site).

[0245] Additional Sequences

[0246] In some embodiments, a Cas9 guide RNA comprises an additional segment or segments (in some cases at the 5′ end, in some cases the 3′ end, in some cases at either the 5′ or 3′ end, in some cases embedded within the sequence (i.e., not at the 5′ and/or 3′ end), in some cases at both the 5′ end and the 3′ end, in some cases embedded and at the 5′ end and/or the 3′ end, etc). For example, a suitable additional segment can comprise a 5′ cap (e.g., a 7-methylguanylate cap (m⁷G)); a 3′ polyadenylated tail (i.e., a 3′ poly(A) tail); a ribozyme sequence (e.g. to allow for self-cleavage of a Cas9 guide RNA (or component of a Cas9 guide RNA, e.g., a targeter, an activator, etc.) and release of a mature PAMmer in a regulated fashion); a riboswitch sequence (e.g., to allow for regulated stability and/or regulated accessibility by proteins and protein complexes); a sequence that forms a dsRNA duplex (i.e., a hairpin)); a sequence that targets an RNA to a subcellular location (e.g., nucleus, mitochondria, chloroplasts, and the like); a modification or sequence that provides for tracking (e.g., a direct label (e.g., direct conjugation to a fluorescent molecule (i.e., fluorescent dye)), conjugation to a moiety that facilitates fluorescent detection, a sequence that allows for fluorescent detection; a modification or sequence that provides a binding site for proteins (e.g., proteins that act on DNA, including transcriptional activators, transcriptional repressors, DNA methyltransferases, DNA demethylases, histone acetyltransferases, histone deacetylases, proteins that bind RNA (e.g., RNA aptamers), labeled proteins, fluorescently labeled proteins, and the like); a modification or sequence that provides for increased, decreased, and/or controllable stability; and combinations thereof.

[0247] Examples of various Cas9 guide RNAs can be found in the art, for example, see Jinek et al., Science. 2012 Aug. 17; 337(6096):816-21; Chylinski et al., RNA Biol. 2013 May; 10(5):726-37; Ma et al., Biomed Res Int. 2013; 2013:270805; Hou et al., Proc Natl Acad Sci USA. 2013 Sep. 24; 110(39):15644-9; Jinek et al., Elife. 2013; 2:e00471; Pattanayak et al., Nat Biotechnol. 2013 September; 31(9):839-43; Qi et al, Cell. 2013 Feb. 28; 152(5):1173-83; Wang et al., Cell. 2013 May 9; 153(4):910-8; Auer et. al., Genome Res. 2013 Oct. 31; Chen et. al., Nucleic Acids Res. 2013 Nov. 1; 41(20):e19; Cheng et. al., Cell Res. 2013 October; 23(10):1163-71; Cho et. al., Genetics. 2013 November; 195(3):1177-80; DiCarlo et al., Nucleic Acids Res. 2013 April; 41(7):4336-43; Dickinson et. al., Nat Methods. 2013 October; 10(10):1028-34; Ebina et. al., Sci Rep. 2013; 3:2510; Fujii et. al, Nucleic Acids Res. 2013 Nov. 1; 41(20):e187; Hu et. al., Cell Res. 2013 November; 23(11):1322-5; Jiang et. al., Nucleic Acids Res. 2013 Nov. 1; 41(20):e188; Larson et. al., Nat Protoc. 2013 November; 8(11):2180-96; Mali et. at., Nat Methods. 2013 October; 10(10):957-63; Nakayama et. al., Genesis. 2013 December; 51(12):835-43; Ran et. al., Nat Protoc. 2013 November; 8(11):2281-308; Ran et. al., Cell. 2013 Sep. 12; 154(6):1380-9; Upadhyay et. al., G3 (Bethesda). 2013 Dec. 9; 3(12):2233-8; Walsh et. al., Proc Natl Acad Sci USA. 2013 Sep. 24; 110(39):15514-5; Xie et. al., Mol Plant. 2013 Oct. 9; Yang et. al., Cell. 2013 Sep. 12; 154(6):1370-9; Briner et al., Mol Cell. 2014 Oct. 23; 56(2):333-9; and U.S. patents and patent applications: U.S. Pat. Nos. 8,906,616; 8,895,308; 8,889,418; 8,889,356; 8,871,445; 8,865,406; 8,795,965; 8,771,945; 8,697,359; 20140068797; 20140170753; 20140179006; 20140179770; 20140186843; 20140186919; 20140186958; 20140189896; 20140227787; 20140234972; 20140242664; 20140242699; 20140242700; 20140242702; 20140248702; 20140256046; 20140273037; 20140273226; 20140273230; 20140273231; 20140273232; 20140273233; 20140273234; 20140273235; 20140287938; 20140295556; 20140295557; 20140298547; 20140304853; 20140309487; 20140310828; 20140310830; 20140315985; 20140335063; 20140335620; 20140342456; 20140342457; 20140342458; 20140349400; 20140349405; 20140356867; 20140356956; 20140356958; 20140356959; 20140357523; 20140357530; 20140364333; and 20140377868; all of which are hereby incorporated by reference in their entirety.

[0248] Cas9 Protein

[0249] A Cas9 guide RNA and a Cas9 protein form a complex. The guide RNA provides target specificity to the complex by having a nucleotide sequence that is complementary to a sequence (the target site) of a target nucleic acid (as noted above). The Cas9 protein of the complex provides the site-specific activity. In other words, the Cas9 protein is guided to a target site (e.g., stabilized at a target site) within a target nucleic acid sequence (e.g. a chromosomal sequence or an extrachromosomal sequence, e.g. an episomal sequence, a minicircle sequence, a mitochondrial sequence, a chloroplast sequence, etc.) by virtue of its association with the protein-binding segment of the Cas9 guide RNA.

[0250] A Cas9 protein can bind and/or modify (e.g., cleave, nick, methylate, demethylate, etc.) a target nucleic acid and/or a polypeptide associated with target nucleic acid (e.g., methylation or acetylation of a histone tail) (e.g., when the Cas9 protein includes a fusion partner with an activity). In some cases, the Cas9 protein is a naturally-occurring protein (e.g, naturally occurs in bacterial and/or archaeal cells). In other cases, the Cas9 protein is not a naturally-occurring polypeptide (e.g., the Cas9 protein is a variant Cas9 protein, a chimeric protein, and the like).

[0251] Examples of suitable Cas9 proteins include, but are not limited to, those set forth in SEQ ID NOs: 1-259, and 795-1346. Naturally occurring Cas9 proteins bind a Cas9 guide RNA, are thereby directed to a specific sequence within a target nucleic acid (a target site), and cleave the target nucleic acid (e.g., cleave dsDNA to generate a double strand break, cleave ssDNA, cleave ssRNA, etc.). A chimeric Cas9 protein (a Cas9 fusion protein) is a fusion protein that is fused to a heterologous protein. The fusion partner can provide an activity, e.g., enzymatic activity (e.g., nuclease activity, activity for DNA and/or RNA methylation, activity for DNA and/or RNA cleavage, activity for histone acetylation, activity for histone methylation, activity for RNA modification, activity for RNA-binding, activity for RNA splicing etc.). In some cases a portion of the Cas9 protein (e.g., the RuvC domain and/or the HNH domain) exhibits reduced nuclease activity relative to the corresponding portion of a wild type Cas9 protein (e.g,. in some cases the Cas9 protein is a nickase). In some cases, the Cas9 protein is enzymatically inactive.

[0252] Assays to determine whether given protein interacts with a Cas9 guide RNA can be any convenient binding assay that tests for binding between a protein and a nucleic acid. Suitable binding assays (e.g., gel shift assays) will be know to one of ordinary skill in the art (e.g., assays that include adding a Cas9 guide RNA and a protein to a target nucleic acid). In some cases, a PAMmer is also added (e.g., in some cases when the target nucleic acid is a single stranded nucleic acid).

[0253] Assays to determine whether a protein has an activity (e.g., to determine if the protein has nuclease activity that cleaves a target nucleic acid and/or some heterologous activity) can be any convenient assay (e.g., any convenient nucleic acid cleavage assay that tests for nucleic acid cleavage). Suitable assays (e.g., cleavage assays) will be known to one of ordinary skill in the art and can include adding a Cas9 guide RNA and a protein to a target nucleic acid. In some cases, a PAMmer is also added (e.g., in some cases when the target nucleic acid is a single stranded nucleic acid).

[0254] In some cases, a Cas9 protein (e.g., a chimeric Cas9 protein) has enzymatic activity that modifies target nucleic acid (e.g., nuclease activity, methyltransferase activity, demethylase activity, DNA repair activity, DNA damage activity, deamination activity, dismutase activity, alkylation activity, depurination activity, oxidation activity, pyrimidine dimer forming activity, integrase activity, transposase activity, recombinase activity, polymerase activity, ligase activity, helicase activity, photolyase activity or glycosylase activity).

[0255] In other cases, a Cas9 protein (e.g., a chimeric Cas9 protein) has enzymatic activity that modifies a polypeptide (e.g., a histone) associated with target nucleic acid (e.g., methyltransferase activity, demethylase activity, acetyltransferase activity, deacetylase activity, kinase activity, phosphatase activity, ubiquitin ligase activity, deubiquitinating activity, adenylation activity, deadenylation activity, SUMOylating activity, deSUMOylating activity, ribosylation activity, deribosylation activity, myristoylation activity or demyristoylation activity).

[0256] Many Cas9 orthologs from a wide variety of species have been identified and the proteins share only a few identical amino acids. Identified Cas9 orthologs have similar domain architecture with a central HNH endonuclease domain and a split RuvC/RNaseH domain (e.g., RuvCI, RuvCII, and RuvCIII). Cas9 proteins share 4 key motifs with a conserved architecture. Motifs 1, 2, and 4 are RuvC like motifs while motif 3 is an HNH-motif. In some cases, a suitable Cas9 protein comprises an amino acid sequence having 4 motifs, each of motifs 1-4 having 60% or more, 70% or more, 75% or more, 80% or more, 85% or more, 90% or more, 95% or more, 99% or more or 100% amino acid sequence identity to motifs 1-4 of the Cas9 amino acid sequence set forth as SEQ ID NO:8 (the motifs are in Table 1, below, and are set forth as SEQ ID NOs: 260-263, respectively), or to the corresponding portions in any of the amino acid sequences set forth in SEQ ID NOs:1-256 and 795-1346.

[0257] In some cases, a suitable Cas9 protein comprises an amino acid sequence having 4 motifs, each of motifs 1-4 having 60% or more amino acid sequence identity to motifs 1-4 of the Cas9 amino acid sequence set forth as SEQ ID NO:8 (the motifs are in Table 1, below, and are set forth as SEQ ID NOs: 260-263, respectively), or to the corresponding portions in any of the amino acid sequences set forth in SEQ ID NOs:1-256 and 795-1346.

[0258] In some cases, a suitable Cas9 protein comprises an amino acid sequence having 4 motifs, each of motifs 1-4 having 70% or more amino acid sequence identity to motifs 1-4 of the Cas9 amino acid sequence set forth as SEQ ID NO:8 (the motifs are in Table 1, below, and are set forth as SEQ ID NOs: 260-263, respectively), or to the corresponding portions in any of the amino acid sequences set forth in SEQ ID NOs:1-256 and 795-1346.

[0259] In some cases, a suitable Cas9 protein comprises an amino acid sequence having 4 motifs, each of motifs 1-4 having 75% or more amino acid sequence identity to motifs 1-4 of the Cas9 amino acid sequence set forth as SEQ ID NO:8 (the motifs are in Table 1, below, and are set forth as SEQ ID NOs: 260-263, respectively), or to the corresponding portions in any of the amino acid sequences set forth in SEQ ID NOs:1-256 and 795-1346.

[0260] In some cases, a suitable Cas9 protein comprises an amino acid sequence having 4 motifs, each of motifs 1-4 having 80% or more amino acid sequence identity to motifs 1-4 of the Cas9 amino acid sequence set forth as SEQ ID NO:8 (the motifs are in Table 1, below, and are set forth as SEQ ID NOs: 260-263, respectively), or to the corresponding portions in any of the amino acid sequences set forth in SEQ ID NOs:1-256 and 795-1346.

[0261] In some cases, a suitable Cas9 protein comprises an amino acid sequence having 4 motifs, each of motifs 1-4 having 85% or more amino acid sequence identity to motifs 1-4 of the Cas9 amino acid sequence set forth as SEQ ID NO:8 (the motifs are in Table 1, below, and are set forth as SEQ ID NOs: 260-263, respectively), or to the corresponding portions in any of the amino acid sequences set forth in SEQ ID NOs:1-256 and 795-1346.

[0262] In some cases, a suitable Cas9 protein comprises an amino acid sequence having 4 motifs, each of motifs 1-4 having 90% or more amino acid sequence identity to motifs 1-4 of the Cas9 amino acid sequence set forth as SEQ ID NO:8 (the motifs are in Table 1, below, and are set forth as SEQ ID NOs: 260-263, respectively), or to the corresponding portions in any of the amino acid sequences set forth in SEQ ID NOs:1-256 and 795-1346.

[0263] In some cases, a suitable Cas9 protein comprises an amino acid sequence having 4 motifs, each of motifs 1-4 having 95% or more amino acid sequence identity to motifs 1-4 of the Cas9 amino acid sequence set forth as SEQ ID NO:8 (the motifs are in Table 1, below, and are set forth as SEQ ID NOs: 260-263, respectively), or to the corresponding portions in any of the amino acid sequences set forth in SEQ ID NOs:1-256 and 795-1346.

[0264] In some cases, a suitable Cas9 protein comprises an amino acid sequence having 4 motifs, each of motifs 1-4 having 99% or more amino acid sequence identity to motifs 1-4 of the Cas9 amino acid sequence set forth as SEQ ID NO:8 (the motifs are in Table 1, below, and are set forth as SEQ ID NOs: 260-263, respectively), or to the corresponding portions in any of the amino acid sequences set forth in SEQ ID NOs:1-256 and 795-1346.

[0265] In some cases, a suitable Cas9 protein comprises an amino acid sequence having 4 motifs, each of motifs 1-4 having 100% amino acid sequence identity to motifs 1-4 of the Cas9 amino acid sequence set forth as SEQ ID NO:8 (the motifs are in Table 1, below, and are set forth as SEQ ID NOs: 260-263, respectively), or to the corresponding portions in any of the amino acid sequences set forth in SEQ ID NOs:1-256 and 795-1346.

[0266] In some cases, a suitable Cas9 protein comprises an amino acid sequence having 60% or more, 70% or more, 75% or more, 80% or more, 85% or more, 90% or more, 95% or more, 99% or more or 100% amino acid sequence identity to amino acids 7-166 or 731-1003 of the Cas9 amino acid sequence set forth in SEQ ID NO: 8, or to the corresponding portions in any of the amino acid sequences set forth as SEQ ID NOs:1-256 and 795-1346. Any Cas9 protein can be used as part of a chimeric Cas9 protein of the subject methods.

[0267] In some cases, a suitable Cas9 protein comprises an amino acid sequence having 60% or more amino acid sequence identity to amino acids 7-166 or 731-1003 of the Cas9 amino acid sequence set forth in SEQ ID NO: 8, or to the corresponding portions in any of the amino acid sequences set forth as SEQ ID NOs:1-256 and 795-1346. Any Cas9 protein can be used as part of a chimeric Cas9 protein of the subject methods.

[0268] In some cases, a suitable Cas9 protein comprises an amino acid sequence having 70% or more amino acid sequence identity to amino acids 7-166 or 731-1003 of the Cas9 amino acid sequence set forth in SEQ ID NO: 8, or to the corresponding portions in any of the amino acid sequences set forth as SEQ ID NOs:1-256 and 795-1346. Any Cas9 protein can be used as part of a chimeric Cas9 protein of the subject methods.

[0269] In some cases, a suitable Cas9 protein comprises an amino acid sequence having 75% or more amino acid sequence identity to amino acids 7-166 or 731-1003 of the Cas9 amino acid sequence set forth in SEQ ID NO: 8, or to the corresponding portions in any of the amino acid sequences set forth as SEQ ID NOs:1-256 and 795-1346. Any Cas9 protein can be used as part of a chimeric Cas9 protein of the subject methods.

[0270] In some cases, a suitable Cas9 protein comprises an amino acid sequence having 80% or more amino acid sequence identity to amino acids 7-166 or 731-1003 of the Cas9 amino acid sequence set forth in SEQ ID NO: 8, or to the corresponding portions in any of the amino acid sequences set forth as SEQ ID NOs:1-256 and 795-1346. Any Cas9 protein can be used as part of a chimeric Cas9 protein of the subject methods.

[0271] In some cases, a suitable Cas9 protein comprises an amino acid sequence having 85% or more amino acid sequence identity to amino acids 7-166 or 731-1003 of the Cas9 amino acid sequence set forth in SEQ ID NO: 8, or to the corresponding portions in any of the amino acid sequences set forth as SEQ ID NOs:1-256 and 795-1346. Any Cas9 protein can be used as part of a chimeric Cas9 protein of the subject methods.

[0272] In some cases, a suitable Cas9 protein comprises an amino acid sequence having 90% or more amino acid sequence identity to amino acids 7-166 or 731-1003 of the Cas9 amino acid sequence set forth in SEQ ID NO: 8, or to the corresponding portions in any of the amino acid sequences set forth as SEQ ID NOs:1-256 and 795-1346. Any Cas9 protein can be used as part of a chimeric Cas9 protein of the subject methods.

[0273] In some cases, a suitable Cas9 protein comprises an amino acid sequence having 95% or more amino acid sequence identity to amino acids 7-166 or 731-1003 of the Cas9 amino acid sequence set forth in SEQ ID NO: 8, or to the corresponding portions in any of the amino acid sequences set forth as SEQ ID NOs:1-256 and 795-1346. Any Cas9 protein can be used as part of a chimeric Cas9 protein of the subject methods.

[0274] In some cases, a suitable Cas9 protein comprises an amino acid sequence having 99% or more amino acid sequence identity to amino acids 7-166 or 731-1003 of the Cas9 amino acid sequence set forth in SEQ ID NO: 8, or to the corresponding portions in any of the amino acid sequences set forth as SEQ ID NOs:1-256 and 795-1346. Any Cas9 protein can be used as part of a chimeric Cas9 protein of the subject methods.

[0275] In some cases, a suitable Cas9 protein comprises an amino acid sequence having 100% amino acid sequence identity to amino acids 7-166 or 731-1003 of the Cas9 amino acid sequence set forth in SEQ ID NO: 8, or to the corresponding portions in any of the amino acid sequences set forth as SEQ ID NOs:1-256 and 795-1346. Any Cas9 protein can be used as part of a chimeric Cas9 protein of the subject methods.

[0276] In some cases, a suitable Cas9 protein comprises an amino acid sequence having 60% or more, 70% or more, 75% or more, 80% or more, 85% or more, 90% or more, 95% or more, 99% or more or 100% amino acid sequence identity to the Cas9 amino acid sequence set forth in SEQ ID NO: 8, or to any of the amino acid sequences set forth as SEQ ID NOs:1-256 and 795-1346. Any Cas9 protein can be used as part of a chimeric Cas9 protein of the subject methods.

[0277] In some cases, a suitable Cas9 protein comprises an amino acid sequence having 60% or more amino acid sequence identity to the Cas9 amino acid sequence set forth in SEQ ID NO: 8, or to any of the amino acid sequences set forth as SEQ ID NOs:1-256 and 795-1346. Any Cas9 protein can be used as part of a chimeric Cas9 protein for use in a subject method.

[0278] In some cases, a suitable Cas9 protein comprises an amino acid sequence having 70% or more amino acid sequence identity to the Cas9 amino acid sequence set forth in SEQ ID NO: 8, or to any of the amino acid sequences set forth as SEQ ID NOs:1-256 and 795-1346. Any Cas9 protein can be used as part of a chimeric Cas9 protein of the subject methods.

[0279] In some cases, a suitable Cas9 protein comprises an amino acid sequence having 75% or more amino acid sequence identity to the Cas9 amino acid sequence set forth in SEQ ID NO: 8, or to any of the amino acid sequences set forth as SEQ ID NOs:1-256 and 795-1346. Any Cas9 protein can be used as part of a chimeric Cas9 protein of the subject methods.

[0280] In some cases, a suitable Cas9 protein comprises an amino acid sequence having 80% or more amino acid sequence identity to the Cas9 amino acid sequence set forth in SEQ ID NO: 8, or to any of the amino acid sequences set forth as SEQ ID NOs:1-256 and 795-1346. Any Cas9 protein can be used as part of a chimeric Cas9 protein of the subject methods.

[0281] In some cases, a suitable Cas9 protein comprises an amino acid sequence having 85% or more amino acid sequence identity to the Cas9 amino acid sequence set forth in SEQ ID NO: 8, or to any of the amino acid sequences set forth as SEQ ID NOs:1-256 and 795-1346. Any Cas9 protein can be used as part of a chimeric Cas9 protein of the subject methods.

[0282] In some cases, a suitable Cas9 protein comprises an amino acid sequence having 90% or more amino acid sequence identity to the Cas9 amino acid sequence set forth in SEQ ID NO: 8, or to any of the amino acid sequences set forth as SEQ ID NOs:1-256 and 795-1346. Any Cas9 protein can be used as part of a chimeric Cas9 protein of the subject methods.

[0283] In some cases, a suitable Cas9 protein comprises an amino acid sequence having 95% or more amino acid sequence identity to the Cas9 amino acid sequence set forth in SEQ ID NO: 8, or to any of the amino acid sequences set forth as SEQ ID NOs:1-256 and 795-1346. Any Cas9 protein can be used as part of a chimeric Cas9 protein of the subject methods.

[0284] In some cases, a suitable Cas9 protein comprises an amino acid sequence having 99% or more amino acid sequence identity to the Cas9 amino acid sequence set forth in SEQ ID NO: 8, or to any of the amino acid sequences set forth as SEQ ID NOs:1-256 and 795-1346. Any Cas9 protein can be used as part of a chimeric Cas9 protein of the subject methods.

[0285] In some cases, a suitable Cas9 protein comprises an amino acid sequence having 100% amino acid sequence identity to the Cas9 amino acid sequence set forth in SEQ ID NO: 8, or to any of the amino acid sequences set forth as SEQ ID NOs:1-256 and 795-1346. Any Cas9 protein can be used as part of a chimeric Cas9 protein of the subject methods.

[0286] In some cases, a Cas9 protein comprises 4 motifs (as listed in Table 1), at least one with (or each with) amino acid sequences having 75% or more, 80% or more, 85% or more, 90% or more, 95% or more, 99% or more or 100% amino acid sequence identity to each of the 4 motifs listed in Table 1 (SEQ ID NOs:260-263), or to the corresponding portions in any of the amino acid sequences set forth as SEQ ID NOs:1-256 and 795-1346.

[0287] As used herein, the term “Cas9 protein” encompasses the term “variant Cas9 protein”; and the term “variant Cas9 protein” encompasses the term “chimeric Cas9 protein” (or “Cas9 fusion protein”).

[0288] Variant Cas9 Proteins

[0289] The present disclosure provides compositions and methods that include a variant Cas9 protein. A variant Cas9 protein has an amino acid sequence that is different by one amino acid (e.g., has a deletion, insertion, substitution, fusion) (i.e., different by at least one amino acid) when compared to the amino acid sequence of a wild type Cas9 protein. In some instances, the variant Cas9 protein has an amino acid change (e.g., deletion, insertion, or substitution) that reduces the nuclease activity of the Cas9 protein. For example, in some instances, the variant Cas9 protein has 50% or less, 40% or less, 30% or less, 20% or less, 10% or less, 5% or less, or 1% or less of the nuclease activity of the corresponding wild-type Cas9 protein. In some cases, the variant Cas9 protein has no substantial nuclease activity. When a Cas9 protein is a variant Cas9 protein that has no substantial nuclease activity, it can be referred to as “dCas9.”

[0290] In some cases, a variant Cas9 protein can cleave the complementary strand of a target nucleic acid but has reduced ability to cleave the non-complementary strand of a target nucleic acid (e.g., a PAMmer can be considered to be the non-complementary strand in cases where the target is a single stranded target). For example, the variant Cas9 protein can have a mutation (amino acid substitution) that reduces the function of the RuvC domain. As a non-limiting example, in some embodiments, a variant Cas9 protein has a mutation at residue D10 (e.g., D10A, aspartate to alanine) of SEQ ID NO:8 or of SEQ ID NO: 1545 (or the corresponding position of any of the proteins set forth in SEQ ID NOs:1-256 and 795-1346) and can therefore cleave the complementary strand of a double stranded target nucleic acid but has reduced ability to cleave the non-complementary strand of a double stranded target nucleic acid (thus resulting in a single strand break (SSB) instead of a double strand break (DSB) when the variant Cas9 protein cleaves a double stranded target nucleic acid) (see, for example, Jinek et al., Science. 2012 Aug. 17; 337(6096):816-21).

[0291] In some cases, a variant Cas9 protein can cleave the non-complementary strand of a target nucleic acid (e.g., a PAMmer can be considered to be the non-complementary strand in cases where the target is a single stranded target) but has reduced ability to cleave the complementary strand of the target nucleic acid. For example, the variant Cas9 protein can have a mutation (amino acid substitution) that reduces the function of the HNH domain Thus, the Cas9 protein can be a nickase that cleaves the non-complementary strand (e.g., a subject quenched PAMmer), but does not cleave the complementary strand (e.g., does not cleave a single stranded target nucleic acid). As a non-limiting example, in some embodiments, the variant Cas9 protein has a mutation at position H840 (e.g., an H840A mutation, histidine to alanine) of SEQ ID NO: 8 or at the corresponding position H839 (e.g., H839A) of SEQ ID NO: 1545 (or the corresponding position of any of the proteins set forth as SEQ ID NOs:1-256 and 795-1346) and can therefore cleave the non-complementary strand of the target nucleic acid (e.g., the quenched PAMmer) but has reduced ability to cleave (e.g., does not cleave) the complementary strand of the target nucleic acid. Such a Cas9 protein has a reduced ability to cleave a target nucleic acid (e.g., a single stranded target nucleic acid) but retains the ability to bind a target nucleic acid (e.g., a single stranded target nucleic acid) and can cleave a bound quenched PAMmer.

[0292] In some cases, a variant Cas9 protein has a reduced ability to cleave both the complementary and the non-complementary strands of a double stranded target nucleic acid. As a non-limiting example, in some cases, the variant Cas9 protein harbors mutations at residues D10 and H840 (e.g., D10A and H840A) of SEQ ID NO: 8 or D10 and H839 of SEQ ID NO: 1545 (or the corresponding residues of any of the proteins set forth as SEQ ID NOs:1-256 and 795-1346) such that the polypeptide has a reduced ability to cleave (e.g., does not cleave) both the complementary and the non-complementary strands of a target nucleic acid. Such a Cas9 protein has a reduced ability to cleave a target nucleic acid (e.g., a single stranded or double stranded target nucleic acid) but retains the ability to bind a target nucleic acid.

[0293] As another non-limiting example, in some cases, the variant Cas9 protein harbors mutations at positions W476 and W1126 (e.g., W476A and W1126A) of SEQ ID NO: 8 (or the corresponding mutations of any of the proteins set forth as SEQ ID NOs:1-256, 795-1346, and 1545) such that the polypeptide has a reduced ability to cleave a target nucleic acid (FIG. 16). Such a Cas9 protein has a reduced ability to cleave a target nucleic acid (e.g., a single stranded target nucleic acid) but retains the ability to bind a target nucleic acid (e.g., a single stranded target nucleic acid).

[0294] As another non-limiting example, in some cases, the variant Cas9 protein harbors mutations at positions P475, W476, N477, D1125, W1126, and D1127A (e.g., P475A, W476A, N477A, D1125A, W1126A, and D1127A) of SEQ ID NO: 8 (or the corresponding mutations of any of the proteins set forth as SEQ ID NOs:1-256, 795-1346, and 1545) such that the polypeptide has a reduced ability to cleave a target nucleic acid (FIG. 16). Such a Cas9 protein has a reduced ability to cleave a target nucleic acid (e.g., a single stranded target nucleic acid) but retains the ability to bind a target nucleic acid (e.g., a single stranded target nucleic acid).

[0295] As another non-limiting example, in some cases, the variant Cas9 protein harbors mutations at positions H840, W476, and W1126 (e.g., H840A, W476A, and W1126A) of SEQ ID NO: 8 (or the corresponding mutations of any of the proteins set forth as SEQ ID NOs:1-256, 795-1346, and 1545) such that the polypeptide has a reduced ability to cleave a target nucleic acid. Such a Cas9 protein has a reduced ability to cleave a target nucleic acid (e.g., a single stranded target nucleic acid) but retains the ability to bind a target nucleic acid (e.g., a single stranded target nucleic acid).

[0296] As another non-limiting example, in some cases, the variant Cas9 protein harbors mutations at positions H840, D10, W476, and W1126 (e.g., H840A, D10A, W476A, and W1126A) of SEQ ID NO: 8 (or the corresponding mutations of any of the proteins set forth as SEQ ID NOs:1-256, 795-1346, and 1545) such that the polypeptide has a reduced ability to cleave a target nucleic acid. Such a Cas9 protein has a reduced ability to cleave a target nucleic acid (e.g., a single stranded target nucleic acid) but retains the ability to bind a target nucleic acid (e.g., a single stranded target nucleic acid).

[0297] As another non-limiting example, in some cases, the variant Cas9 protein harbors mutations at positions H840, P475, W476, N477, D1125, W1126, and D1127 (e.g., H840A, P475A, W476A, N477A, D1125A, W1126A, and D1127A) of SEQ ID NO: 8 (or the corresponding mutations of any of the proteins set forth as SEQ ID NOs:1-256, 795-1346, and 1545) such that the polypeptide has a reduced ability to cleave a target nucleic acid. Such a Cas9 protein has a reduced ability to cleave a target nucleic acid (e.g., a single stranded target nucleic acid) but retains the ability to bind a target nucleic acid (e.g., a single stranded target nucleic acid).

[0298] As another non-limiting example, in some cases, the variant Cas9 protein harbors mutations at positions D10, H840, P475, W476, N477, D1125, W1126, and D1127 (e.g., D 10A, H840A, P475A, W476A, N477A, D1125A, W1126A, and D1127A) of SEQ ID NO: 8 (or the corresponding mutations of any of the proteins set forth as SEQ ID NOs:1-256, 795-1346, and 1545) such that the polypeptide has a reduced ability to cleave a target nucleic acid. Such a Cas9 protein has a reduced ability to cleave a target nucleic acid (e.g., a single stranded target nucleic acid) but retains the ability to bind a target nucleic acid (e.g., a single stranded target nucleic acid).

[0299] In some cases, when a variant Cas9 protein harbors mutations at positions W476 and W1126 (e.g., W476A and W1126A) of SEQ ID NO: 8 (or the corresponding mutations of any of the proteins set forth as SEQ ID NOs:1-256, 795-1346, and 1545); or when the variant Cas9 protein harbors mutations at positions P475, W476, N477, D1125, W1126, and D1127 (e.g., P475A, W476A, N477A, D1125A, W1126A, and D1127A) of SEQ ID NO: 8 (or the corresponding mutations of any of the proteins set forth as SEQ ID NOs:1-256, 795-1346, and 1545), the variant Cas9 protein does not bind efficiently to a PAM sequence. Thus, in some such cases, when such a variant Cas9 protein is used in a method of binding, the method need not include a PAMmer. In other words, in some cases, when such a variant Cas9 protein is used in a method of binding, the method can include a Cas9 guide RNA, but the method can be performed in the absence of a PAMmer (and the specificity of binding is therefore provided by the targeting segment of the Cas9 guide RNA).

[0300] Other residues can be mutated to achieve the above effects (i.e. inactivate one or the other nuclease portions). As non-limiting examples, residues D10, G12, G17, E762, H840, N854, N863, H982, H983, A984, D986, and/or A987 of SEQ ID NO: 8 (or the corresponding mutations of any of the proteins set forth as SEQ ID NOs:1-256, 795-1346, and 1545) can be altered (i.e., substituted). Also, mutations other than alanine substitutions are suitable.

[0301] In some embodiments, a variant Cas9 protein that has reduced catalytic activity (e.g., when a Cas9 protein has a D10, G12, G17, E762, H840, N854, N863, H982, H983, A984, D986, and/or a A987 mutation of SEQ ID NO: 8 or the corresponding mutations of any of the proteins set forth as SEQ ID NOs:1-256, 795-1346, and 1545, e.g., D10A, G12A, G17A, E762A, H840A, N854A, N863A, H982A, H983A, A984A, and/or D986A), the variant Cas9 protein can still bind to target nucleic acid in a site-specific manner (because it is still guided to a target nucleic acid sequence by a Cas9 guide RNA) as long as it retains the ability to interact with the Cas9 guide RNA.

TABLE 1
Table 1 lists 4 motifs that are present in Cas9 sequences from
various species (see also FIG. 9 and FIG. 10). The amino acids
listed in Table 1 are from the Cas9 from S. pyogenes (SEQ ID NO: 8).

| Motif # | Motif | Amino acids (residue #s) | Highly conserved |
|---|---|---|---|
| 1 | RuvC-like I | IGLDIGTNSVGWAVI (7-21) | D10, G12, G17 |
| | | (SEQ ID NO: 260) | |
| 2 | RuvC-like II | IVIEMARE (759-766) | E762 |
| | | (SEQ ID NO: 261) | |
| 3 | HNH-motif | DVDHIVPQSFLKDDSIDNKVLTRSDKN | H840, N854, N863 |
| | | (837-863) (SEQ ID NO: 262) | |
| 4 | RuvC-like II | HHAHDAYL(982-989) | H982, H983, A984, |
| | | (SEQ ID NO: 263) | D986, A987 |

[0302] In addition to the above, a variant Cas9 protein can have the same parameters for sequence identity as described above for Cas9 proteins. Thus, in some cases, a suitable variant Cas9 protein comprises an amino acid sequence having 4 motifs, each of motifs 1-4 having 60% or more, 70% or more, 75% or more, 80% or more, 85% or more, 90% or more, 95% or more, 99% or more or 100% amino acid sequence identity to motifs 1-4 of the Cas9 amino acid sequence set forth as SEQ ID NO:8 (the motifs are in Table 1, below, and are set forth as SEQ ID NOs: 260-263, respectively), or to the corresponding portions in any of the amino acid sequences set forth in SEQ ID NOs:1-256, 795-1346, and 1545.

[0303] In some cases, a suitable variant Cas9 protein comprises an amino acid sequence having 4 motifs, each of motifs 1-4 having 60% or more amino acid sequence identity to motifs 1-4 of the Cas9 amino acid sequence set forth as SEQ ID NO:8 (the motifs are in Table 1, below, and are set forth as SEQ ID NOs: 260-263, respectively), or to the corresponding portions in any of the amino acid sequences set forth in SEQ ID NOs:1-256, 795-1346, and 1545.

[0304] In some cases, a suitable variant Cas9 protein comprises an amino acid sequence having 4 motifs, each of motifs 1-4 having 70% or more amino acid sequence identity to motifs 1-4 of the Cas9 amino acid sequence set forth as SEQ ID NO:8 (the motifs are in Table 1, below, and are set forth as SEQ ID NOs: 260-263, respectively), or to the corresponding portions in any of the amino acid sequences set forth in SEQ ID NOs:1-256, 795-1346, and 1545.

[0305] In some cases, a suitable variant Cas9 protein comprises an amino acid sequence having 4 motifs, each of motifs 1-4 having 75% or more amino acid sequence identity to motifs 1-4 of the Cas9 amino acid sequence set forth as SEQ ID NO:8 (the motifs are in Table 1, below, and are set forth as SEQ ID NOs: 260-263, respectively), or to the corresponding portions in any of the amino acid sequences set forth in SEQ ID NOs:1-256, 795-1346, and 1545.

[0306] In some cases, a suitable variant Cas9 protein comprises an amino acid sequence having 4 motifs, each of motifs 1-4 having 80% or more amino acid sequence identity to motifs 1-4 of the Cas9 amino acid sequence set forth as SEQ ID NO:8 (the motifs are in Table 1, below, and are set forth as SEQ ID NOs: 260-263, respectively), or to the corresponding portions in any of the amino acid sequences set forth in SEQ ID NOs:1-256, 795-1346, and 1545.

[0307] In some cases, a suitable variant Cas9 protein comprises an amino acid sequence having 4 motifs, each of motifs 1-4 having 85% or more amino acid sequence identity to motifs 1-4 of the Cas9 amino acid sequence set forth as SEQ ID NO:8 (the motifs are in Table 1, below, and are set forth as SEQ ID NOs: 260-263, respectively), or to the corresponding portions in any of the amino acid sequences set forth in SEQ ID NOs:1-256, 795-1346, and 1545.

[0308] In some cases, a suitable variant Cas9 protein comprises an amino acid sequence having 4 motifs, each of motifs 1-4 having 90% or more amino acid sequence identity to motifs 1-4 of the Cas9 amino acid sequence set forth as SEQ ID NO:8 (the motifs are in Table 1, below, and are set forth as SEQ ID NOs: 260-263, respectively), or to the corresponding portions in any of the amino acid sequences set forth in SEQ ID NOs:1-256, 795-1346, and 1545.

[0309] In some cases, a suitable variant Cas9 protein comprises an amino acid sequence having 4 motifs, each of motifs 1-4 having 95% or more amino acid sequence identity to motifs 1-4 of the Cas9 amino acid sequence set forth as SEQ ID NO:8 (the motifs are in Table 1, below, and are set forth as SEQ ID NOs: 260-263, respectively), or to the corresponding portions in any of the amino acid sequences set forth in SEQ ID NOs:1-256, 795-1346, and 1545.

[0310] In some cases, a suitable variant Cas9 protein comprises an amino acid sequence having 4 motifs, each of motifs 1-4 having 99% or more amino acid sequence identity to motifs 1-4 of the Cas9 amino acid sequence set forth as SEQ ID NO:8 (the motifs are in Table 1, below, and are set forth as SEQ ID NOs: 260-263, respectively), or to the corresponding portions in any of the amino acid sequences set forth in SEQ ID NOs:1-256, 795-1346, and 1545.

[0311] In some cases, a suitable variant Cas9 protein comprises an amino acid sequence having 4 motifs, each of motifs 1-4 having 100% amino acid sequence identity to motifs 1-4 of the Cas9 amino acid sequence set forth as SEQ ID NO:8 (the motifs are in Table 1, below, and are set forth as SEQ ID NOs: 260-263, respectively), or to the corresponding portions in any of the amino acid sequences set forth in SEQ ID NOs:1-256, 795-1346, and 1545.

[0312] In some cases, a suitable variant Cas9 protein comprises an amino acid sequence having 60% or more, 70% or more, 75% or more, 80% or more, 85% or more, 90% or more, 95% or more, 99% or more, or 100% amino acid sequence identity to amino acids 7-166 or 731-1003 of the Cas9 amino acid sequence set forth in SEQ ID NO: 8, or to the corresponding portions in any of the amino acid sequences set forth as SEQ ID NOs:1-256, 795-1346, and 1545. Any Cas9 protein as defined above can be used as a variant Cas9 protein or as part of a chimeric variant Cas9 protein of the subject methods.

[0313] In some cases, a suitable variant Cas9 protein comprises an amino acid sequence having 60% or more amino acid sequence identity to amino acids 7-166 or 731-1003 of the Cas9 amino acid sequence set forth in SEQ ID NO: 8, or to the corresponding portions in any of the amino acid sequences set forth as SEQ ID NOs:1-256, 795-1346, and 1545. Any Cas9 protein as defined above can be used as a variant Cas9 protein or as part of a chimeric variant Cas9 protein of the subject methods.

[0314] In some cases, a suitable variant Cas9 protein comprises an amino acid sequence having 70% or more amino acid sequence identity to amino acids 7-166 or 731-1003 of the Cas9 amino acid sequence set forth in SEQ ID NO: 8, or to the corresponding portions in any of the amino acid sequences set forth as SEQ ID NOs:1-256, 795-1346, and 1545. Any Cas9 protein as defined above can be used as a variant Cas9 protein or as part of a chimeric variant Cas9 protein of the subject methods.

[0315] In some cases, a suitable variant Cas9 protein comprises an amino acid sequence having 75% or more amino acid sequence identity to amino acids 7-166 or 731-1003 of the Cas9 amino acid sequence set forth in SEQ ID NO: 8, or to the corresponding portions in any of the amino acid sequences set forth as SEQ ID NOs:1-256, 795-1346, and 1545. Any Cas9 protein as defined above can be used as a variant Cas9 protein or as part of a chimeric variant Cas9 protein of the subject methods.

[0316] In some cases, a suitable variant Cas9 protein comprises an amino acid sequence having 80% or more amino acid sequence identity to amino acids 7-166 or 731-1003 of the Cas9 amino acid sequence set forth in SEQ ID NO: 8, or to the corresponding portions in any of the amino acid sequences set forth as SEQ ID NOs:1-256, 795-1346, and 1545. Any Cas9 protein as defined above can be used as a variant Cas9 protein or as part of a chimeric variant Cas9 protein of the subject methods.

[0317] In some cases, a suitable variant Cas9 protein comprises an amino acid sequence having 85% or more amino acid sequence identity to amino acids 7-166 or 731-1003 of the Cas9 amino acid sequence set forth in SEQ ID NO: 8, or to the corresponding portions in any of the amino acid sequences set forth as SEQ ID NOs:1-256, 795-1346, and 1545. Any Cas9 protein as defined above can be used as a variant Cas9 protein or as part of a chimeric variant Cas9 protein of the subject methods.

[0318] In some cases, a suitable variant Cas9 protein comprises an amino acid sequence having 90% or more amino acid sequence identity to amino acids 7-166 or 731-1003 of the Cas9 amino acid sequence set forth in SEQ ID NO: 8, or to the corresponding portions in any of the amino acid sequences set forth as SEQ ID NOs:1-256, 795-1346, and 1545. Any Cas9 protein as defined above can be used as a variant Cas9 protein or as part of a chimeric variant Cas9 protein of the subject methods.

[0319] In some cases, a suitable variant Cas9 protein comprises an amino acid sequence having 95% or more amino acid sequence identity to amino acids 7-166 or 731-1003 of the Cas9 amino acid sequence set forth in SEQ ID NO: 8, or to the corresponding portions in any of the amino acid sequences set forth as SEQ ID NOs:1-256, 795-1346, and 1545. Any Cas9 protein as defined above can be used as a variant Cas9 protein or as part of a chimeric variant Cas9 protein of the subject methods.

[0320] In some cases, a suitable variant Cas9 protein comprises an amino acid sequence having 99% or more amino acid sequence identity to amino acids 7-166 or 731-1003 of the Cas9 amino acid sequence set forth in SEQ ID NO: 8, or to the corresponding portions in any of the amino acid sequences set forth as SEQ ID NOs:1-256, 795-1346, and 1545. Any Cas9 protein as defined above can be used as a variant Cas9 protein or as part of a chimeric variant Cas9 protein of the subject methods.

[0321] In some cases, a suitable variant Cas9 protein comprises an amino acid sequence having 100% amino acid sequence identity to amino acids 7-166 or 731-1003 of the Cas9 amino acid sequence set forth in SEQ ID NO: 8, or to the corresponding portions in any of the amino acid sequences set forth as SEQ ID NOs:1-256, 795-1346, and 1545. Any Cas9 protein as defined above can be used as a variant Cas9 protein or as part of a chimeric variant Cas9 protein of the subject methods.

[0322] In some cases, a suitable variant Cas9 protein comprises an amino acid sequence having 60% or more, 70% or more, 75% or more, 80% or more, 85% or more, 90% or more, 95% or more, 99% or more, or 100% amino acid sequence identity to the Cas9 amino acid sequence set forth in SEQ ID NO: 8, or to any of the amino acid sequences set forth as SEQ ID NOs:1-256, 795-1346, and 1545. Any Cas9 protein as defined above can be used as a variant Cas9 protein or as part of a chimeric variant Cas9 protein of the subject methods.

[0323] In some cases, a suitable variant Cas9 protein comprises an amino acid sequence having 60% or more amino acid sequence identity to the Cas9 amino acid sequence set forth in SEQ ID NO: 8, or to any of the amino acid sequences set forth as SEQ ID NOs:1-256, 795-1346, and 1545. Any Cas9 protein as defined above can be used as a variant Cas9 protein or as part of a chimeric variant Cas9 protein of the subject methods.

[0324] In some cases, a suitable variant Cas9 protein comprises an amino acid sequence having 70% or more amino acid sequence identity to the Cas9 amino acid sequence set forth in SEQ ID NO: 8, or to any of the amino acid sequences set forth as SEQ ID NOs:1-256, 795-1346, and 1545. Any Cas9 protein as defined above can be used as a variant Cas9 protein or as part of a chimeric variant Cas9 protein of the subject methods.

[0325] In some cases, a suitable variant Cas9 protein comprises an amino acid sequence having 75% or more amino acid sequence identity to the Cas9 amino acid sequence set forth in SEQ ID NO: 8, or to any of the amino acid sequences set forth as SEQ ID NOs:1-256, 795-1346, and 1545. Any Cas9 protein as defined above can be used as a variant Cas9 protein or as part of a chimeric variant Cas9 protein of the subject methods.

[0326] In some cases, a suitable variant Cas9 protein comprises an amino acid sequence having 80% or more amino acid sequence identity to the Cas9 amino acid sequence set forth in SEQ ID NO: 8, or to any of the amino acid sequences set forth as SEQ ID NOs:1-256, 795-1346, and 1545. Any Cas9 protein as defined above can be used as a variant Cas9 protein or as part of a chimeric variant Cas9 protein of the subject methods.

[0327] In some cases, a suitable variant Cas9 protein comprises an amino acid sequence having 85% or more amino acid sequence identity to the Cas9 amino acid sequence set forth in SEQ ID NO: 8, or to any of the amino acid sequences set forth as SEQ ID NOs:1-256, 795-1346, and 1545. Any Cas9 protein as defined above can be used as a variant Cas9 protein or as part of a chimeric variant Cas9 protein of the subject methods.

[0328] In some cases, a suitable variant Cas9 protein comprises an amino acid sequence having 90% or more amino acid sequence identity to the Cas9 amino acid sequence set forth in SEQ ID NO: 8, or to any of the amino acid sequences set forth as SEQ ID NOs:1-256, 795-1346, and 1545. Any Cas9 protein as defined above can be used as a variant Cas9 protein or as part of a chimeric variant Cas9 protein of the subject methods.

[0329] In some cases, a suitable variant Cas9 protein comprises an amino acid sequence having 95% or more amino acid sequence identity to the Cas9 amino acid sequence set forth in SEQ ID NO: 8, or to any of the amino acid sequences set forth as SEQ ID NOs:1-256, 795-1346, and 1545. Any Cas9 protein as defined above can be used as a variant Cas9 protein or as part of a chimeric variant Cas9 protein of the subject methods.

[0330] In some cases, a suitable variant Cas9 protein comprises an amino acid sequence having 99% or more amino acid sequence identity to the Cas9 amino acid sequence set forth in SEQ ID NO: 8, or to any of the amino acid sequences set forth as SEQ ID NOs:1-256, 795-1346, and 1545. Any Cas9 protein as defined above can be used as a variant Cas9 protein or as part of a chimeric variant Cas9 protein of the subject methods.

[0331] In some cases, a suitable variant Cas9 protein comprises an amino acid sequence having 100% amino acid sequence identity to the Cas9 amino acid sequence set forth in SEQ ID NO: 8, or to any of the amino acid sequences set forth as SEQ ID NOs:1-256, 795-1346, and 1545. Any Cas9 protein as defined above can be used as a variant Cas9 protein or as part of a chimeric variant Cas9 protein of the subject methods.

[0332] Cas9 Heterodimers

[0333] In some cases, a variant Cas9 protein is a Cas9 heterodimer. A Cas9 heterodimer comprises two polypeptides, where the two polypeptides are not covalently linked to one another. A Cas9 heterodimer is also referred to herein as a “heterodimeric Cas9 complex” and/or or a “split Cas9 protein” and/or or a “heterodimeric Cas9 protein.” A Cas9 heterodimer includes a first fusion polypeptide comprising a first polypeptide (e.g., a Cas9 nuclease lobe) covalently linked (directly or via a linker) to a first fusion partner; and a second fusion polypeptide comprising a second polypeptide (e.g., a Cas9 alpha-helical lobe) covalently linked (directly or via a linker) to a second fusion partner. In some cases, the first polypeptide (e.g., a Cas9 nuclease lobe) is circularly permuted (i.e., in some cases, the first polypeptide is a circular permutant).

[0334] A Cas9 heterodimer comprises two polypeptides that can interact to form a complex (i.e., to form the heterodimeric Cas9 protein). A Cas9 heterodimer is also referred to herein as a “split Cas9” or a “split Cas9 protein.” The fusion partners present in the first fusion polypeptide and the second fusion polypeptide can be induced to dimerize (e.g, by a dimerizing agent). When the fusion partners present in the first fusion polypeptide and the second fusion polypeptide dimerize, the first fusion polypeptide and the second fusion polypeptide dimerize. In the absence of a dimerizing agent, and in the absence of a guide RNA that includes a stem loop 2 and/or a stem loop 3, the first fusion polypeptide and the second fusion polypeptide do not dimerize. When the first fusion polypeptide and the second fusion polypeptide dimerize, the Cas9 heterodimer, together with a truncated guide RNA (e.g., a guide RNA that does not include stem loop 2 and/or stem loop 3), can bind a target nucleic acid (an in some cases modify, e.g., cleave or otherwise modify the target nucleic acid). A Cas9 heterodimer and a truncated guide RNA form a “Cas9 heterodimer system,” described herein. A Cas9 heterodimer system can bind to a target nucleic acid. In some cases, a Cas9 heterodimer system can bind to a target nucleic acid and cleave a PAMmer (e.g., a quenched PAMmer) that is hybridized to the target nucleic acid. In some cases, a Cas9 heterodimer system can bind to a target nucleic acid and cleave the target nucleic acid. In some cases, a Cas9 heterodimer system can bind to a target nucleic acid and modify the target nucleic acid. In some cases, a Cas9 heterodimer system can bind to a target nucleic acid and modulate transcription of/from the target nucleic acid.

[0335] A subject Cas9 heterodimer (a split Cas9 protein) includes a first polypeptide (where the first polypeptide includes a Cas9 nuclease lobe) and a second polypeptide (where the second polypeptide includes a Cas9 alpha-helical lobe). A nuclease lobe includes: (i) a RuvC domain, where a RuvC domain comprises a RuvCI polypeptide, a RuvCII polypeptide, and a RuvCIII polypeptide; (ii) an HNH domain (also referred to as an HNH polypeptide); and (iii) a PAM-interacting domain (also referred to as a “PAM-interacting polypeptide”). A Cas9 alpha-helical lobe is also referred to as an “alpha-helical recognition region.”

[0336] Cas9 Heterodimers with Nuclease Lobe and Alpha-Helical Lobe

[0337] In some cases, a Cas9 heterodimer comprises : A) a first fusion polypeptide comprising: a) a first polypeptide comprising: i) a RuvCI polypeptide; ii) a RuvCII polypeptide; iii) an HNH polypeptide; iv) a RuvCIII polypeptide; and v) a PAM-interacting polypeptide; and b) a first fusion partner, where the first fusion partner is a first member of a dimerization pair; and B) a second fusion polypeptide comprising: a) an alpha-helical recognition region; and b) a second fusion partner, where the second fusion partner is a second member of a dimerization pair.

[0338] First Fusion Polypeptide

[0339] As noted above, in some cases, a Cas9 heterodimer comprises : A) a first fusion polypeptide comprising: a) a first polypeptide comprising: i) a RuvCI polypeptide; ii) a RuvCII polypeptide; iii) an HNH polypeptide; iv) a RuvCIII polypeptide; and v) a PAM-interacting polypeptide; and b) a first fusion partner, where the first fusion partner is a first member of a dimerization pair; and B) a second fusion polypeptide comprising: a) an alpha-helical recognition region; and b) a second fusion partner, where the second fusion partner is a second member of a dimerization pair.

[0340] A RuvCI polypeptide can comprise an amino acid sequence having at least 75%, at least 80%, at least 85%, at least 90%, at least 95%, at least 98%, at least 99%, or 100%, amino acid sequence identity to a contiguous stretch of from 40 amino acids to 60 amino acids of amino acids 1-60 of the S. pyogenes Cas9 amino acid sequence set forth in SEQ ID NO: 1545, or a corresponding segment of a Cas9 polypeptide amino acid sequence set forth in any of SEQ ID NOs: 1-259 and 795-1346; and can have a length of from 40 amino acids to 80 amino acids, e.g., from 40 amino acids to 50 amino acids, from 50 amino acids to 60 amino acids, from 60 amino acids to 70 amino acids, or from 70 amino acids to 80 amino acids. In some cases, a RuvCI polypeptide comprises an amino acid sequence having at least 75%, at least 80%, at least 85%, at least 90%, at least 95%, at least 98%, at least 99%, or 100%, amino acid sequence identity to amino acids 1-60 of the S. pyogenes Cas9 amino acid sequence set forth in SEQ ID NO: 1545, or a corresponding segment of a Cas9 polypeptide amino acid sequence set forth in any of SEQ ID NOs: 1-259 and 795-1346; and has a length of from 50 amino acids to 60 amino acids (e.g., 50, 51, 52, 53, 54, 55, 56, 57, 58, 59, or 60 amino acids). For example, in some cases, a RuvCI polypeptide can have at least 75%, at least 80%, at least 85%, at least 90%, at least 95%, at least 98%, at least 99%, or 100%, amino acid sequence identity to amino acids 2-56 of the S. pyogenes Cas9 amino acid sequence set forth in SEQ ID NO: 1545, or a corresponding segment of a Cas9 polypeptide amino acid sequence set forth in any of SEQ ID NOs: 1-259 and 795-1346.

[0341] A RuvCII polypeptide can comprise an amino acid sequence having at least 75%, at least 80%, at least 85%, at least 90%, at least 95%, at least 98%, at least 99%, or 100%, amino acid sequence identity to a contiguous stretch of from 40 to 57 amino acids of amino acids 718-774 of the S. pyogenes Cas9 amino acid sequence set forth in SEQ ID NO: 1545, or a corresponding segment of a Cas9 polypeptide amino acid sequence set forth in any of SEQ ID NOs: 1-259 and 795-1346; and can have a length of from 40 amino acids to about 70 amino acids, e.g., from 40 amino acids to 45 amino acids, from 45 amino acids to 50 amino acids, from 50 amino acids to 55 amino acids, from 55 amino acids to 60 amino acids, from 60 amino acids to 65 amino acids, or from 65 amino acids to 70 amino acids. In some cases, a RuvCII polypeptide comprises an amino acid sequence having at least 75%, at least 80%, at least 85%, at least 90%, at least 95%, at least 98%, at least 99%, or 100%, amino acid sequence identity to amino acids 718-774 of the S. pyogenes Cas9 amino acid sequence set forth in SEQ ID NO: 1545, or a corresponding segment of a Cas9 polypeptide amino acid sequence set forth in any of SEQ ID NOs: 1-259 and 795-1346; and has a length of 55-60 (e.g., 55, 56, 57, 58, 59, or 60) amino acids.

[0342] In some cases, a short alpha-helix (S717-L727 in the S. pyogenes Cas9 set forth as SEQ ID NO: 1545) can be removed, e.g., to minimize the distance between the end of RuvCI and the beginning of RuvCII. In some cases, a short alpha-helix (S717-L727 in the S. pyogenes Cas9 set forth as SEQ ID NO: 1545) is removed and the RuvCI polypeptide is connected to the RuvCII polypeptide with a linker (e.g., a glycine-serine-serine linker, and as described elsewhere).

[0343] A RuvCII polypeptide can comprise an amino acid sequence having at least 75%, at least 80%, at least 85%, at least 90%, at least 95%, at least 98%, at least 99%, or 100%, amino acid sequence identity to a contiguous stretch of from 40 to 46 amino acids of amino acids 729-775 of the S. pyogenes Cas9 amino acid sequence set forth in SEQ ID NO: 1545, or a corresponding segment of a Cas9 polypeptide amino acid sequence set forth in any of SEQ ID NOs: 1-259 and 795-1346; and can have a length of from 40 amino acids to about 60 amino acids, e.g., from 40 amino acids to 45 amino acids, from 45 amino acids to 50 amino acids, from 50 amino acids to 55 amino acids, or from 55 amino acids to 60 amino acids. In some cases, a RuvCII polypeptide comprises an amino acid sequence having at least 75%, at least 80%, at least 85%, at least 90%, at least 95%, at least 98%, at least 99%, or 100%, amino acid sequence identity to amino acids 728-774 of the S. pyogenes Cas9 amino acid sequence set forth in SEQ ID NO: 1545, or a corresponding segment of a Cas9 polypeptide amino acid sequence set forth in any of SEQ ID NOs: 1-259 and 795-1346; and has a length of 45-50 (e.g., 45, 46, 47, 48, 49, or 50) amino acids.

[0344] An HNH polypeptide can comprise an amino acid sequence having at least 75%, at least 80%, at least 85%, at least 90%, at least 95%, at least 98%, at least 99%, or 100%, amino acid sequence identity to a contiguous stretch of from 100 to 134 amino acids of amino acids 776-909 of the S. pyogenes Cas9 amino acid sequence set forth in SEQ ID NO: 1545, or a corresponding segment of a Cas9 polypeptide amino acid sequence set forth in any of SEQ ID NOs: 1-259 and 795-1346; and can have a length of from 90 amino acids to 150 amino acids, e.g., from 90 amino acids to 95 amino acids, from 95 to amino acids to 100 amino acids, from 100 amino acids to 125 amino acids, from 125 amino acids to 130 amino acids, from 130 amino acids to 135 amino acids, from 135 amino acids to 140 amino acids, from 140 amino acids to 145 amino acids, or from 145 amino acids to 150 amino acids. In some cases, an HNH polypeptide comprises an amino acid sequence having at least 75%, at least 80%, at least 85%, at least 90%, at least 95%, at least 98%, at least 99%, or 100%, amino acid sequence identity to amino acids 776-909 of the S. pyogenes Cas9 amino acid sequence set forth in SEQ ID NO: 1545, or a corresponding segment of a Cas9 polypeptide amino acid sequence set forth in any of SEQ ID NOs: 1-259 and 795-1346; and has a length of from 130 amino acids to 140 amino acids (e.g., 130, 131, 132, 133, 134, 135, 136, 137, 138, 139, or 140 amino acids).

[0345] A RuvCIII polypeptide can comprise an amino acid sequence having at least 75%, at least 80%, at least 85%, at least 90%, at least 95%, at least 98%, at least 99%, or 100%, amino acid sequence identity to a contiguous stretch of from 150 amino acids to 190 amino acids of amino acids 910 to 1099 of the S. pyogenes Cas9 amino acid sequence set forth in SEQ ID NO: 1545, or a corresponding segment of a Cas9 polypeptide amino acid sequence set forth in any of SEQ ID NOs: 1-259 and 795-1346; and can have a length of from 150 amino acids to 160 amino acids, from 160 amino acids to 170 amino acids, from 170 amino acids to 180 amino acids, from 180 amino acids to 190 amino acids, from 190 amino acids to 200 amino acids, from 200 amino acids to 210 amino acids, or from 210 amino acids to 220 amino acids. In some cases, a RuvCIII polypeptide comprises an amino acid sequence having at least 75%, at least 80%, at least 85%, at least 90%, at least 95%, at least 98%, at least 99%, or 100%, amino acid sequence identity to amino acids 910 to 1099 of the S. pyogenes Cas9 amino acid sequence set forth in SEQ ID NO: 1545, or a corresponding segment of a Cas9 polypeptide amino acid sequence set forth in any of SEQ ID NOs: 1-259 and 795-1346; and has a length of from 180 amino acids to 190 amino acids (e.g., 180, 181, 182, 183, 184, 185, 186, 187, 188, 189, or 190 amino acids).

[0346] A PAM-interacting polypeptide can comprise an amino acid sequence having at least 75%, at least 80%, at least 85%, at least 90%, at least 95%, at least 98%, at least 99%, or 100%, amino acid sequence identity to a contiguous stretch of from 200 amino acids to 268 amino acids of amino acids 1100 to 1367 of the S. pyogenes Cas9 amino acid sequence set forth in SEQ ID NO: 1545, or a corresponding segment of a Cas9 polypeptide amino acid sequence set forth in any of SEQ ID NOs: 1-259 and 795-1346; and can have a length of from 240 amino acids to 280 amino acids, e.g., from 240 amino acids to 250 amino acids, from 250 amino acids to 260 amino acids, from 260 amino acids to 270 amino acids, or from 270 amino acids to 280 amino acids. In some cases, a PAM-interacting polypeptide comprises an amino acid sequence having at least 75%, at least 80%, at least 85%, at least 90%, at least 95%, at least 98%, at least 99%, or 100%, amino acid sequence identity to amino acids 1100 to 1367 of the S. pyogenes Cas9 amino acid sequence set forth in SEQ ID NO: 1545, or a corresponding segment of a Cas9 polypeptide amino acid sequence set forth in any of SEQ ID NOs: 1-259 and 795-1346; and has a length of from 260 amino acids to 270 amino acids (e.g., 260, 261, 262, 263, 264, 265, 266, 267, 268, 269, or 270 amino acids).

[0347] Heterologous Subcellular Localization Sequences

[0348] In some cases, the first fusion polypeptide comprises a heterologous sequence that provides for subcellular localization (e.g., an NLS for targeting to the nucleus; a mitochondrial localization signal for targeting to the mitochondria; a chloroplast localization signal for targeting to a chloroplast; an ER retention signal; and the like). In some cases, the first fusion polypeptide includes 2 or more, 3 or more, 4 or more, or 5 or more NLSs. In some cases, an NLS is located at or near (e.g., within 75 amino acids, 50 amino acids, or 30 amino acids) the N-terminus and/or at or near (e.g., within 75 amino acids, 50 amino acids, or 30 amino acids) the C-terminus.

[0349] In some cases, the first fusion polypeptide comprises an NLS. For example, in some cases, the first fusion polypeptide comprises, in order from N-terminus to C-terminus: a) an NLS; b) a first fusion partner; and c) a first polypeptide comprising: i) a RuvCI polypeptide; ii) a RuvCII polypeptide; iii) an HNH polypeptide; iv) a RuvCIII polypeptide; and v) a PAM-interacting polypeptide. In some cases, the first fusion polypeptide comprises an NLS. For example, in some cases, the first fusion polypeptide comprises, in order from N-terminus to C-terminus: a) an NLS; b) a first fusion partner; c) a first polypeptide comprising: i) a RuvCI polypeptide; ii) a RuvCII polypeptide; iii) an HNH polypeptide; iv) a RuvCIII polypeptide; and v) a PAM-interacting polypeptide; and d) an NLS. In some cases, the first fusion polypeptide comprises an NLS. For example, in some cases, the first fusion polypeptide comprises, in order from N-terminus to C-terminus: a) an NLS; b) a first fusion partner; c) a first polypeptide comprising: i) a RuvCI polypeptide; ii) a RuvCII polypeptide; iii) an HNH polypeptide; iv) a RuvCIII polypeptide; and v) a PAM-interacting polypeptide; and d) an NLS. In some cases, the first fusion polypeptide comprises an NLS. In some cases, the first fusion polypeptide comprises, in order from N-terminus to C-terminus: a) an NLS; b) a first polypeptide comprising: i) a RuvCI polypeptide; ii) a RuvCII polypeptide; iii) an HNH polypeptide; iv) a RuvCIII polypeptide; and v) a PAM-interacting polypeptide; and c) a first fusion partner. In some cases, the first fusion polypeptide comprises, in order from N-terminus to C-terminus: a) an NLS; b) a first polypeptide comprising: i) a RuvCI polypeptide; ii) a RuvCII polypeptide; iii) an HNH polypeptide; iv) a RuvCIII polypeptide; and v) a PAM-interacting polypeptide; c) a first fusion partner; and d) an NLS. In some cases, the NLS comprises the amino acid sequence MAPKKKRKVGIHGVPAA (SEQ ID NO: 1546). In some cases, the NLS comprises the amino acid sequence KRPAATKKAGQAKKKK (SEQ ID NO: 1547). Other suitable NLS are described elsewhere herein.

[0350] An NLS can be at or near the N-terminus and/or the C-terminus. In some cases, the first fusion polypeptide comprises two or more NLSs (e.g., 3 or more, 4 or more, or 5 or more NLSs). In some cases, the first fusion polypeptide comprises one or more NLSs (e.g., 2 or more, 3 or more, or 4 or more NLSs) at or near the N-terminus and/or one or more NLSs (e.g., 2 or more, 3 or more, or 4 or more NLSs) at or near the C-terminus. The term “at or near” is used here because, as is known in the art, the NLS need not be at the actual terminus of a protein, but can be positioned near (e.g., within 100 amino acids of) an N- and/or C-terminus (e.g., within 80, within 75, within 60, within 55, within 50, within 45, within 40, within 35, or within 30 amino acids of the an N- and/or C-terminus).

[0351] Fusion Partner at or Near N-Terminus of First Fusion Polypeptide

[0352] In some cases, the first fusion polypeptide comprises, in order from N-terminus to C-terminus: a) a first fusion partner; and b) a first polypeptide comprising: i) a RuvCI polypeptide; ii) a RuvCII polypeptide; iii) an HNH polypeptide; iv) a RuvCIII polypeptide; and v) a PAM-interacting polypeptide.

[0353] In some cases, a first fusion polypeptide comprises one or more linker polypeptides. For example, a linker polypeptide can be interposed between any of: a) an NLS and a fusion partner; b) a fusion partner and a RuvCI polypeptide; c) a RuvCI polypeptide and a RuvCII polypeptide; and d) a PAM-interacting polypeptide and an NLS.

[0354] The linker polypeptide may have any of a variety of amino acid sequences. Proteins can be joined by a spacer peptide, generally of a flexible nature, although other chemical linkages are not excluded. Suitable linkers include polypeptides of between about 6 amino acids and about 40 amino acids in length, or between about 6 amino acids and about 25 amino acids in length. These linkers are generally produced by using synthetic, linker-encoding oligonucleotides to couple the proteins. Peptide linkers with a degree of flexibility will generally be preferred. The linking peptides may have virtually any amino acid sequence, bearing in mind that the preferred linkers will have a sequence that results in a generally flexible peptide. The use of small amino acids, such as glycine and alanine, are of use in creating a flexible peptide. The creation of such sequences is routine to those of skill in the art. A variety of different linkers are commercially available and are considered suitable for use.

[0355] Exemplary polypeptide linkers include glycine polymers (G)ₙ, glycine-serine polymers (including, for example, (GS)ₙ, GSGGSₙ (SEQ ID NO: 1548) and GGGSₙ (SEQ ID NO: 1549), where n is an integer of at least one), glycine-alanine polymers, alanine-serine polymers. Exemplary linkers can comprise amino acid sequences including, but not limited to, GGSG (SEQ ID NO: 1550), GGSGG (SEQ ID NO: 1551), GSGSG (SEQ ID NO: 1552), GSGGG (SEQ ID NO: 1553), GGGSG (SEQ ID NO: 1554), GSSSG (SEQ ID NO: 1555), and the like. The ordinarily skilled artisan will recognize that design of a peptide conjugated to any elements described above can include linkers that are all or partially flexible, such that the linker can include a flexible linker as well as one or more portions that confer less flexible structure.

[0356] Fusion Partner at or Near C-Terminus of First Fusion Polypeptide

[0357] In some cases, the first fusion polypeptide comprises, in order from N-terminus to C-terminus: a) a first polypeptide comprising: i) a RuvCI polypeptide; ii) a RuvCII polypeptide; iii) an HNH polypeptide; iv) a RuvCIII polypeptide; and v) a PAM-interacting polypeptide; and b) a first fusion partner.

[0358] In some cases, a first fusion polypeptide comprises one or more linker polypeptides. For example, a linker polypeptide can be interposed between any of: a) an NLS and a RuvCI polypeptide; b) a RuvCI polypeptide and a RuvCII polypeptide; c) a PAM-interacting polypeptide and an NLS; d) a PAM-interacting polypeptide and a second fusion partner; and e) a fusion partner and an NLS. Suitable linker polypeptides are as described above.

[0359] Fusion Partner Located Internally within First Fusion Polypeptide

[0360] In some cases, the fusion partner is located internally with the first polypeptide. In some cases, the first fusion partner is inserted within the HNH polypeptide. In some cases, the first fusion partner is inserted within the RuvCIII polypeptide.

[0361] Fusion Partner Inserted into HNH Polypeptide

[0362] In some cases, the first fusion partner is inserted within the HNH polypeptide. The HNH polypeptide of S. pyogenes Cas9 is amino acids 776-909 of the amino acid sequence set forth in SEQ ID NO: 1545. For example, in some cases, the first fusion partner is inserted in a site within amino acids 800 to 900 of amino acids 776-909 of the amino acid sequence of the S. pyogenes Cas9 amino acid sequence set forth in SEQ ID NO: 1545, or a corresponding segment of a Cas9 polypeptide amino acid sequence set forth in any of SEQ ID NOs: 1-259 and 795-1346. For example, in some cases, the first fusion partner is inserted at or near amino acid 868 of amino acids 776-909 of the amino acid sequence of the S. pyogenes Cas9 amino acid sequence set forth in SEQ ID NO: 1545, or a corresponding segment of a Cas9 polypeptide amino acid sequence set forth in any of SEQ ID NOs: 1-259 and 795-1346. In some cases, the first fusion partner is inserted at amino acid 868 of amino acids 776-909 of the amino acid sequence of the S. pyogenes Cas9 amino acid sequence set forth in SEQ ID NO: 1545, or a corresponding segment of a Cas9 polypeptide amino acid sequence set forth in any of SEQ ID NOs: 1-259 and 795-1346. In some cases, the first fusion partner is inserted at amino acid 860 of amino acids 776-909 of the amino acid sequence of the S. pyogenes Cas9 amino acid sequence set forth in SEQ ID NO: 1545, or a corresponding segment of a Cas9 polypeptide amino acid sequence set forth in any of SEQ ID NOs: 1-259 and 795-1346. In some cases, the first fusion partner is inserted at amino acid 861 of amino acids 776-909 of the amino acid sequence of the S. pyogenes Cas9 amino acid sequence set forth in SEQ ID NO: 1545, or a corresponding segment of a Cas9 polypeptide amino acid sequence set forth in any of SEQ ID NOs: 1-259 and 795-1346. In some cases, the first fusion partner is inserted at amino acid 862 of amino acids 776-909 of the amino acid sequence of the S. pyogenes Cas9 amino acid sequence set forth in SEQ ID NO: 1545, or a corresponding segment of a Cas9 polypeptide amino acid sequence set forth in any of SEQ ID NOs: 1-259 and 795-1346. In some cases, the first fusion partner is inserted at amino acid 863 of amino acids 776-909 of the amino acid sequence of the S. pyogenes Cas9 amino acid sequence set forth in SEQ ID NO: 1545, or a corresponding segment of a Cas9 polypeptide amino acid sequence set forth in any of SEQ ID NOs: 1-259 and 795-1346. In some cases, the first fusion partner is inserted at amino acid 864 of amino acids 776-909 of the amino acid sequence of the S. pyogenes Cas9 amino acid sequence set forth in SEQ ID NO: 1545, or a corresponding segment of a Cas9 polypeptide amino acid sequence set forth in any of SEQ ID NOs: 1-259 and 795-1346. In some cases, the first fusion partner is inserted at amino acid 865 of amino acids 776-909 of the amino acid sequence of the S. pyogenes Cas9 amino acid sequence set forth in SEQ ID NO: 1545, or a corresponding segment of a Cas9 polypeptide amino acid sequence set forth in any of SEQ ID NOs: 1-259 and 795-1346. In some cases, the first fusion partner is inserted at amino acid 866 of amino acids 776-909 of the amino acid sequence of the S. pyogenes Cas9 amino acid sequence set forth in SEQ ID NO: 1545, or a corresponding segment of a Cas9 polypeptide amino acid sequence set forth in any of SEQ ID NOs: 1-259 and 795-1346. In some cases, the first fusion partner is inserted at amino acid 867 of amino acids 776-909 of the amino acid sequence of the S. pyogenes Cas9 amino acid sequence set forth in SEQ ID NO: 1545, or a corresponding segment of a Cas9 polypeptide amino acid sequence set forth in any of SEQ ID NOs: 1-259 and 795-1346. In some cases, the first fusion partner is inserted at amino acid 869 of amino acids 776-909 of the amino acid sequence of the S. pyogenes Cas9 amino acid sequence set forth in SEQ ID NO: 1545, or a corresponding segment of a Cas9 polypeptide amino acid sequence set forth in any of SEQ ID NOs: 1-259 and 795-1346. In some cases, the first fusion partner is inserted at amino acid 870 of amino acids 776-909 of the amino acid sequence of the S. pyogenes Cas9 amino acid sequence set forth in SEQ ID NO: 1545, or a corresponding segment of a Cas9 polypeptide amino acid sequence set forth in any of SEQ ID NOs: 1-259 and 795-1346. In some cases, the first fusion partner is inserted at amino acid 871 of amino acids 776-909 of the amino acid sequence of the S. pyogenes Cas9 amino acid sequence set forth in SEQ ID NO: 1545, or a corresponding segment of a Cas9 polypeptide amino acid sequence set forth in any of SEQ ID NOs: 1-259 and 795-1346. In some cases, the first fusion partner is inserted at amino acid 872 of amino acids 776-909 of the amino acid sequence of the S. pyogenes Cas9 amino acid sequence set forth in SEQ ID NO: 1545, or a corresponding segment of a Cas9 polypeptide amino acid sequence set forth in any of SEQ ID NOs: 1-259 and 795-1346. In some cases, the first fusion partner is inserted at amino acid 873 of amino acids 776-909 of the amino acid sequence of the S. pyogenes Cas9 amino acid sequence set forth in SEQ ID NO: 1545, or a corresponding segment of a Cas9 polypeptide amino acid sequence set forth in any of SEQ ID NOs: 1-259 and 795-1346. In some cases, the first fusion partner is inserted at amino acid 874 of amino acids 776-909 of the amino acid sequence of the S. pyogenes Cas9 amino acid sequence set forth in SEQ ID NO: 1545, or a corresponding segment of a Cas9 polypeptide amino acid sequence set forth in any of SEQ ID NOs: 1-259 and 795-1346. In some cases, the first fusion partner is inserted at amino acid 875 of amino acids 776-909 of the amino acid sequence of the S. pyogenes Cas9 amino acid sequence set forth in SEQ ID NO: 1545, or a corresponding segment of a Cas9 polypeptide amino acid sequence set forth in any of SEQ ID NOs: 1-259 and 795-1346.

[0363] As one non-limiting example, the first fusion polypeptide can comprise, in order from N-terminus to C-terminus: i) a RuvCI polypeptide; ii) a RuvCII polypeptide; iii) an N-terminal portion of an HNH polypeptide; iv) a first fusion partner; v) a C-terminal portion of an HNH polypeptide; vi) a RuvCIII polypeptide; and v) a PAM-interacting polypeptide.

[0364] An N-terminal portion of an HNH polypeptide can comprise an amino acid sequence having at least 75%, at least 80%, at least 85%, at least 90%, at least 95%, at least 98%, at least 99%, or 100%, amino acid sequence identity to a contiguous stretch of from 80 amino acids to 92 amino acids of amino acids 776 to 867 of the S. pyogenes Cas9 amino acid sequence set forth in SEQ ID NO: 1545, or a corresponding segment of a Cas9 polypeptide amino acid sequence set forth in any of SEQ ID NOs: 1-259 and 795-1346; and can have a length of from 80 amino acids to 110 amino acids, e.g., from 80 amino acids to 90 amino acids, from 90 amino acids to 100 amino acids, or from 100 amino acids to 110 amino acids. In some cases, an N-terminal portion of an HNH polypeptide comprises an amino acid sequence having at least 75%, at least 80%, at least 85%, at least 90%, at least 95%, at least 98%, at least 99%, or 100%, amino acid sequence identity to amino acids 776 to 867 of the S. pyogenes Cas9 amino acid sequence set forth in SEQ ID NO: 1545, or a corresponding segment of a Cas9 polypeptide amino acid sequence set forth in any of SEQ ID NOs: 1-259 and 795-1346; and has a length of 85 amino acids to 95 amino acids (85, 86, 87, 88, 89, 90, 91, 92, 93, 94, or 95 amino acids). An N-terminal portion of an HNH polypeptide can comprise an amino acid sequence having at least 75%, at least 80%, at least 85%, at least 90%, at least 95%, at least 98%, at least 99%, or 100%, amino acid sequence identity to a contiguous stretch of from 50 amino acids to 66 amino acids of amino acids 776-841 of the S. pyogenes Cas9 amino acid sequence set forth in SEQ ID NO: 1545, or a corresponding segment of a Cas9 polypeptide amino acid sequence set forth in any of SEQ ID NOs: 1-259 and 795-1346; and can have a length of from 50 amino acids to 80 amino acids, e.g., from 50 amino acids to 60 amino acids, from 60 amino acids to 70 amino acids, or from 70 amino acids to 80 amino acids.

[0365] A C-terminal portion of an HNH polypeptide can comprise an amino acid sequence having at least 75%, at least 80%, at least 85%, at least 90%, at least 95%, at least 98%, at least 99%, or 100%, amino acid sequence identity to a contiguous stretch of from 35 to 42 amino acids of amino acids 868-909 of the S. pyogenes Cas9 amino acid sequence set forth in SEQ ID NO: 1545, or a corresponding segment of a Cas9 polypeptide amino acid sequence set forth in any of SEQ ID NOs: 1-259 and 795-1346; and can have a length of from 35 to 42 amino acids (e.g., 35, 36, 37, 38, 39, 40, 41, or 42 amino acids). A C-terminal portion of an HNH polypeptide can comprise an amino acid sequence having at least 75%, at least 80%, at least 85%, at least 90%, at least 95%, at least 98%, at least 99%, or 100%, amino acid sequence identity to a contiguous stretch of from 50 amino acids to 67 amino acids of amino acids 842-909 of the S. pyogenes Cas9 amino acid sequence set forth in SEQ ID NO: 1545, or a corresponding segment of a Cas9 polypeptide amino acid sequence set forth in any of SEQ ID NOs: 1-259 and 795-1346; and can have a length of from 50 amino acids to 80 amino acids, e.g., from 50 amino acids to 60 amino acids, from 60 amino acids to 70 amino acids, or from 70 amino acids to 80 amino acids.

[0366] For example, in some cases, the first fusion polypeptide comprises, in order from N-terminus to C-terminus: i) a RuvCI polypeptide; ii) a RuvCII polypeptide; iii) an N-terminal portion of an HNH polypeptide comprising an amino acid sequence having at least 75%, at least 80%, at least 85%, at least 90%, at least 95%, at least 98%, at least 99%, or 100%, amino acid sequence identity to amino acids 719 to 860 of the S. pyogenes Cas9 amino acid sequence set forth in SEQ ID NO: 1545, or a corresponding segment of a Cas9 polypeptide amino acid sequence set forth in any of SEQ ID NOs: 1-259 and 795-1346; iv) a first fusion partner; v) a C-terminal portion of an HNH polypeptide comprising an amino acid sequence having at least 75%, at least 80%, at least 85%, at least 90%, at least 95%, at least 98%, at least 99%, or 100%, amino acid sequence identity to amino acids 861 to 909 of the S. pyogenes Cas9 amino acid sequence set forth in SEQ ID NO: 1545, or a corresponding segment of a Cas9 polypeptide amino acid sequence set forth in any of SEQ ID NOs: 1-259 and 795-1346; vi) a RuvCIII polypeptide; and vii) a PAM-interacting polypeptide.

[0367] As another example, in some cases, the first fusion polypeptide comprises, in order from N-terminus to C-terminus: i) a RuvCI polypeptide; ii) a RuvCII polypeptide; iii) an N-terminal portion of an HNH polypeptide comprising an amino acid sequence having at least 75%, at least 80%, at least 85%, at least 90%, at least 95%, at least 98%, at least 99%, or 100%, amino acid sequence identity to amino acids 719 to 861 of the S. pyogenes Cas9 amino acid sequence set forth in SEQ ID NO: 1545, or a corresponding segment of a Cas9 polypeptide amino acid sequence set forth in any of SEQ ID NOs: 1-259 and 795-1346; iv) a first fusion partner; v) a C-terminal portion of an HNH polypeptide comprising an amino acid sequence having at least 75%, at least 80%, at least 85%, at least 90%, at least 95%, at least 98%, at least 99%, or 100%, amino acid sequence identity to amino acids 862 to 909 of the S. pyogenes Cas9 amino acid sequence set forth in SEQ ID NO: 1545, or a corresponding segment of a Cas9 polypeptide amino acid sequence set forth in any of SEQ ID NOs: 1-259 and 795-1346; vi) a RuvCIII polypeptide; and vii) a PAM-interacting polypeptide.

[0368] As another example, in some cases, the first fusion polypeptide comprises, in order from N-terminus to C-terminus: i) a RuvCI polypeptide; ii) a RuvCII polypeptide; iii) an N-terminal portion of an HNH polypeptide comprising an amino acid sequence having at least 75%, at least 80%, at least 85%, at least 90%, at least 95%, at least 98%, at least 99%, or 100%, amino acid sequence identity to amino acids 719 to 862 of the S. pyogenes Cas9 amino acid sequence set forth in SEQ ID NO: 1545, or a corresponding segment of a Cas9 polypeptide amino acid sequence set forth in any of SEQ ID NOs: 1-259 and 795-1346; iv) a first fusion partner; v) a C-terminal portion of an HNH polypeptide comprising an amino acid sequence having at least 75%, at least 80%, at least 85%, at least 90%, at least 95%, at least 98%, at least 99%, or 100%, amino acid sequence identity to amino acids 863 to 909 of the S. pyogenes Cas9 amino acid sequence set forth in SEQ ID NO: 1545, or a corresponding segment of a Cas9 polypeptide amino acid sequence set forth in any of SEQ ID NOs: 1-259 and 795-1346; vi) a RuvCIII polypeptide; and vii) a PAM-interacting polypeptide.

[0369] As another example, in some cases, the first fusion polypeptide comprises, in order from N-terminus to C-terminus: i) a RuvCI polypeptide; ii) a RuvCII polypeptide; iii) an N-terminal portion of an HNH polypeptide comprising an amino acid sequence having at least 75%, at least 80%, at least 85%, at least 90%, at least 95%, at least 98%, at least 99%, or 100%, amino acid sequence identity to amino acids 719 to 863 of the S. pyogenes Cas9 amino acid sequence set forth in SEQ ID NO: 1545, or a corresponding segment of a Cas9 polypeptide amino acid sequence set forth in any of SEQ ID NOs: 1-259 and 795-1346; iv) a first fusion partner; v) a C-terminal portion of an HNH polypeptide comprising an amino acid sequence having at least 75%, at least 80%, at least 85%, at least 90%, at least 95%, at least 98%, at least 99%, or 100%, amino acid sequence identity to amino acids 864 to 909 of the S. pyogenes Cas9 amino acid sequence set forth in SEQ ID NO: 1545, or a corresponding segment of a Cas9 polypeptide amino acid sequence set forth in any of SEQ ID NOs: 1-259 and 795-1346; vi) a RuvCIII polypeptide; and vii) a PAM-interacting polypeptide.

[0370] As another example, in some cases, the first fusion polypeptide comprises, in order from N-terminus to C-terminus: i) a RuvCI polypeptide; ii) a RuvCII polypeptide; iii) an N-terminal portion of an HNH polypeptide comprising an amino acid sequence having at least 75%, at least 80%, at least 85%, at least 90%, at least 95%, at least 98%, at least 99%, or 100%, amino acid sequence identity to amino acids 719 to 864 of the S. pyogenes Cas9 amino acid sequence set forth in SEQ ID NO: 1545, or a corresponding segment of a Cas9 polypeptide amino acid sequence set forth in any of SEQ ID NOs: 1-259 and 795-1346; iv) a first fusion partner; v) a C-terminal portion of an HNH polypeptide comprising an amino acid sequence having at least 75%, at least 80%, at least 85%, at least 90%, at least 95%, at least 98%, at least 99%, or 100%, amino acid sequence identity to amino acids 865 to 909 of the S. pyogenes Cas9 amino acid sequence set forth in SEQ ID NO: 1545, or a corresponding segment of a Cas9 polypeptide amino acid sequence set forth in any of SEQ ID NOs: 1-259 and 795-1346; vi) a RuvCIII polypeptide; and vii) a PAM-interacting polypeptide.

[0371] As another example, in some cases, the first fusion polypeptide comprises, in order from N-terminus to C-terminus: i) a RuvCI polypeptide; ii) a RuvCII polypeptide; iii) an N-terminal portion of an HNH polypeptide comprising an amino acid sequence having at least 75%, at least 80%, at least 85%, at least 90%, at least 95%, at least 98%, at least 99%, or 100%, amino acid sequence identity to amino acids 719 to 865 of the S. pyogenes Cas9 amino acid sequence set forth in SEQ ID NO: 1545, or a corresponding segment of a Cas9 polypeptide amino acid sequence set forth in any of SEQ ID NOs: 1-259 and 795-1346; iv) a first fusion partner; v) a C-terminal portion of an HNH polypeptide comprising an amino acid sequence having at least 75%, at least 80%, at least 85%, at least 90%, at least 95%, at least 98%, at least 99%, or 100%, amino acid sequence identity to amino acids 866 to 909 of the S. pyogenes Cas9 amino acid sequence set forth in SEQ ID NO: 1545, or a corresponding segment of a Cas9 polypeptide amino acid sequence set forth in any of SEQ ID NOs: 1-259 and 795-1346; vi) a RuvCIII polypeptide; and vii) a PAM-interacting polypeptide.

[0372] As another example, in some cases, the first fusion polypeptide comprises, in order from N-terminus to C-terminus: i) a RuvCI polypeptide; ii) a RuvCII polypeptide; iii) an N-terminal portion of an HNH polypeptide comprising an amino acid sequence having at least 75%, at least 80%, at least 85%, at least 90%, at least 95%, at least 98%, at least 99%, or 100%, amino acid sequence identity to amino acids 719 to 866 of the S. pyogenes Cas9 amino acid sequence set forth in SEQ ID NO: 1545, or a corresponding segment of a Cas9 polypeptide amino acid sequence set forth in any of SEQ ID NOs: 1-259 and 795-1346; iv) a first fusion partner; v) a C-terminal portion of an HNH polypeptide comprising an amino acid sequence having at least 75%, at least 80%, at least 85%, at least 90%, at least 95%, at least 98%, at least 99%, or 100%, amino acid sequence identity to amino acids 867 to 909 of the S. pyogenes Cas9 amino acid sequence set forth in SEQ ID NO: 1545, or a corresponding segment of a Cas9 polypeptide amino acid sequence set forth in any of SEQ ID NOs: 1-259 and 795-1346; vi) a RuvCIII polypeptide; and vii) a PAM-interacting polypeptide.

[0373] As another example, in some cases, the first fusion polypeptide comprises, in order from N-terminus to C-terminus: i) a RuvCI polypeptide; ii) a RuvCII polypeptide; iii) an N-terminal portion of an HNH polypeptide comprising an amino acid sequence having at least 75%, at least 80%, at least 85%, at least 90%, at least 95%, at least 98%, at least 99%, or 100%, amino acid sequence identity to amino acids 719 to 867 of the S. pyogenes Cas9 amino acid sequence set forth in SEQ ID NO: 1545, or a corresponding segment of a Cas9 polypeptide amino acid sequence set forth in any of SEQ ID NOs: 1-259 and 795-1346; iv) a first fusion partner; v) a C-terminal portion of an HNH polypeptide comprising an amino acid sequence having at least 75%, at least 80%, at least 85%, at least 90%, at least 95%, at least 98%, at least 99%, or 100%, amino acid sequence identity to amino acids 868 to 909 of the S. pyogenes Cas9 amino acid sequence set forth in SEQ ID NO: 1545, or a corresponding segment of a Cas9 polypeptide amino acid sequence set forth in any of SEQ ID NOs: 1-259 and 795-1346; vi) a RuvCIII polypeptide; and v) a PAM-interacting polypeptide.

[0374] As another example, in some cases, the first fusion polypeptide comprises, in order from N-terminus to C-terminus: i) a RuvCI polypeptide; ii) a RuvCII polypeptide; iii) an N-terminal portion of an HNH polypeptide comprising an amino acid sequence having at least 75%, at least 80%, at least 85%, at least 90%, at least 95%, at least 98%, at least 99%, or 100%, amino acid sequence identity to amino acids 719 to 868 of the S. pyogenes Cas9 amino acid sequence set forth in SEQ ID NO: 1545, or a corresponding segment of a Cas9 polypeptide amino acid sequence set forth in any of SEQ ID NOs: 1-259 and 795-1346; iv) a first fusion partner; v) a C-terminal portion of an HNH polypeptide comprising an amino acid sequence having at least 75%, at least 80%, at least 85%, at least 90%, at least 95%, at least 98%, at least 99%, or 100%, amino acid sequence identity to amino acids 869 to 909 of the S. pyogenes Cas9 amino acid sequence set forth in SEQ ID NO: 1545, or a corresponding segment of a Cas9 polypeptide amino acid sequence set forth in any of SEQ ID NOs: 1-259 and 795-1346; vi) a RuvCIII polypeptide; and vii) a PAM-interacting polypeptide.

[0375] As another example, in some cases, the first fusion polypeptide comprises, in order from N-terminus to C-terminus: i) a RuvCI polypeptide; ii) a RuvCII polypeptide; iii) an N-terminal portion of an HNH polypeptide comprising an amino acid sequence having at least 75%, at least 80%, at least 85%, at least 90%, at least 95%, at least 98%, at least 99%, or 100%, amino acid sequence identity to amino acids 719 to 869 of the S. pyogenes Cas9 amino acid sequence set forth in SEQ ID NO: 1545, or a corresponding segment of a Cas9 polypeptide amino acid sequence set forth in any of SEQ ID NOs: 1-259 and 795-1346; iv) a first fusion partner; v) a C-terminal portion of an HNH polypeptide comprising an amino acid sequence having at least 75%, at least 80%, at least 85%, at least 90%, at least 95%, at least 98%, at least 99%, or 100%, amino acid sequence identity to amino acids 870 to 909 of the S. pyogenes Cas9 amino acid sequence set forth in SEQ ID NO: 1545, or a corresponding segment of a Cas9 polypeptide amino acid sequence set forth in any of SEQ ID NOs: 1-259 and 795-1346; vi) a RuvCIII polypeptide; and vii) a PAM-interacting polypeptide.

[0376] As another example, in some cases, the first fusion polypeptide comprises, in order from N-terminus to C-terminus: i) a RuvCI polypeptide; ii) a RuvCII polypeptide; iii) an N-terminal portion of an HNH polypeptide comprising an amino acid sequence having at least 75%, at least 80%, at least 85%, at least 90%, at least 95%, at least 98%, at least 99%, or 100%, amino acid sequence identity to amino acids 719 to 870 of the S. pyogenes Cas9 amino acid sequence set forth in SEQ ID NO: 1545, or a corresponding segment of a Cas9 polypeptide amino acid sequence set forth in any of SEQ ID NOs: 1-259 and 795-1346; iv) a first fusion partner; v) a C-terminal portion of an HNH polypeptide comprising an amino acid sequence having at least 75%, at least 80%, at least 85%, at least 90%, at least 95%, at least 98%, at least 99%, or 100%, amino acid sequence identity to amino acids 871 to 909 of the S. pyogenes Cas9 amino acid sequence set forth in SEQ ID NO: 1545, or a corresponding segment of a Cas9 polypeptide amino acid sequence set forth in any of SEQ ID NOs: 1-259 and 795-1346; vi) a RuvCIII polypeptide; and vii) a PAM-interacting polypeptide.

[0377] As another example, in some cases, the first fusion polypeptide comprises, in order from N-terminus to C-terminus: i) a RuvCI polypeptide; ii) a RuvCII polypeptide; iii) an N-terminal portion of an HNH polypeptide comprising an amino acid sequence having at least 75%, at least 80%, at least 85%, at least 90%, at least 95%, at least 98%, at least 99%, or 100%, amino acid sequence identity to amino acids 719 to 871 of the S. pyogenes Cas9 amino acid sequence set forth in SEQ ID NO: 1545, or a corresponding segment of a Cas9 polypeptide amino acid sequence set forth in any of SEQ ID NOs: 1-259 and 795-1346; iv) a first fusion partner; v) a C-terminal portion of an HNH polypeptide comprising an amino acid sequence having at least 75%, at least 80%, at least 85%, at least 90%, at least 95%, at least 98%, at least 99%, or 100%, amino acid sequence identity to amino acids 872 to 909 of the S. pyogenes Cas9 amino acid sequence set forth in SEQ ID NO: 1545, or a corresponding segment of a Cas9 polypeptide amino acid sequence set forth in any of SEQ ID NOs: 1-259 and 795-1346; vi) a RuvCIII polypeptide; and vii) a PAM-interacting polypeptide.

[0378] As another example, in some cases, the first fusion polypeptide comprises, in order from N-terminus to C-terminus: i) a RuvCI polypeptide; ii) a RuvCII polypeptide; iii) an N-terminal portion of an HNH polypeptide comprising an amino acid sequence having at least 75%, at least 80%, at least 85%, at least 90%, at least 95%, at least 98%, at least 99%, or 100%, amino acid sequence identity to amino acids 719 to 872 of the S. pyogenes Cas9 amino acid sequence set forth in SEQ ID NO: 1545, or a corresponding segment of a Cas9 polypeptide amino acid sequence set forth in any of SEQ ID NOs: 1-259 and 795-1346; iv) a first fusion partner; v) a C-terminal portion of an HNH polypeptide comprising an amino acid sequence having at least 75%, at least 80%, at least 85%, at least 90%, at least 95%, at least 98%, at least 99%, or 100%, amino acid sequence identity to amino acids 873 to 909 of the S. pyogenes Cas9 amino acid sequence set forth in SEQ ID NO: 1545, or a corresponding segment of a Cas9 polypeptide amino acid sequence set forth in any of SEQ ID NOs: 1-259 and 795-1346; vi) a RuvCIII polypeptide; and vii) a PAM-interacting polypeptide.

[0379] As another example, in some cases, the first fusion polypeptide comprises, in order from N-terminus to C-terminus: i) a RuvCI polypeptide; ii) a RuvCII polypeptide; iii) an N-terminal portion of an HNH polypeptide comprising an amino acid sequence having at least 75%, at least 80%, at least 85%, at least 90%, at least 95%, at least 98%, at least 99%, or 100%, amino acid sequence identity to amino acids 719 to 873 of the S. pyogenes Cas9 amino acid sequence set forth in SEQ ID NO: 1545, or a corresponding segment of a Cas9 polypeptide amino acid sequence set forth in any of SEQ ID NOs: 1-259 and 795-1346; iv) a first fusion partner; v) a C-terminal portion of an HNH polypeptide comprising an amino acid sequence having at least 75%, at least 80%, at least 85%, at least 90%, at least 95%, at least 98%, at least 99%, or 100%, amino acid sequence identity to amino acids 874 to 909 of the S. pyogenes Cas9 amino acid sequence set forth in SEQ ID NO: 1545, or a corresponding segment of a Cas9 polypeptide amino acid sequence set forth in any of SEQ ID NOs: 1-259 and 795-1346; vi) a RuvCIII polypeptide; and vii) a PAM-interacting polypeptide.

[0380] As another example, in some cases, the first fusion polypeptide comprises, in order from N-terminus to C-terminus: i) a RuvCI polypeptide; ii) a RuvCII polypeptide; iii) an N-terminal portion of an HNH polypeptide comprising an amino acid sequence having at least 75%, at least 80%, at least 85%, at least 90%, at least 95%, at least 98%, at least 99%, or 100%, amino acid sequence identity to amino acids 719 to 874 of the S. pyogenes Cas9 amino acid sequence set forth in SEQ ID NO: 1545, or a corresponding segment of a Cas9 polypeptide amino acid sequence set forth in any of SEQ ID NOs: 1-259 and 795-1346; iv) a first fusion partner; v) a C-terminal portion of an HNH polypeptide comprising an amino acid sequence having at least 75%, at least 80%, at least 85%, at least 90%, at least 95%, at least 98%, at least 99%, or 100%, amino acid sequence identity to amino acids 875 to 909 of the S. pyogenes Cas9 amino acid sequence set forth in SEQ ID NO: 1545, or a corresponding segment of a Cas9 polypeptide amino acid sequence set forth in any of SEQ ID NOs: 1-259 and 795-1346; vi) a RuvCIII polypeptide; and vii) a PAM-interacting polypeptide.

[0381] Fusion Partner Inserted within RuvCIII Polypeptide

[0382] In some cases, the first fusion partner is inserted within the RuvCIII polypeptide. The RuvCIII polypeptide of S. pyogenes Cas9 is amino acids 910-1099 of the amino acid sequence set forth in SEQ ID NO: 1545. For example, in some cases, the first fusion partner is inserted in a site within amino acids 950 to 1060 of amino acids 910-1099 of the amino acid sequence of the S. pyogenes Cas9 amino acid sequence set forth in SEQ ID NO: 1545, or a corresponding segment of a Cas9 polypeptide amino acid sequence set forth in any of SEQ ID NOs: 1-259 and 795-1346. For example, in some cases, the first fusion partner is inserted at or near amino acid 1016 of amino acids 910-1099 of the amino acid sequence of the S. pyogenes Cas9 amino acid sequence set forth in SEQ ID NO: 1545, or a corresponding segment of a Cas9 polypeptide amino acid sequence set forth in any of SEQ ID NOs: 1-259 and 795-1346. In some cases, the first fusion partner is inserted at amino acid 1016 of amino acids 910-1099 of the amino acid sequence of the S. pyogenes Cas9 amino acid sequence set forth in SEQ ID NO: 1545, or a corresponding segment of a Cas9 polypeptide amino acid sequence set forth in any of SEQ ID NOs: 1-259 and 795-1346. In some cases, the first fusion partner is inserted at amino acid 1010 of amino acids 910-1099 of the amino acid sequence of the S. pyogenes Cas9 amino acid sequence set forth in SEQ ID NO: 1545, or a corresponding segment of a Cas9 polypeptide amino acid sequence set forth in any of SEQ ID NOs: 1-259 and 795-1346. In some cases, the first fusion partner is inserted at amino acid 1011 of amino acids 910-1099 of the amino acid sequence of the S. pyogenes Cas9 amino acid sequence set forth in SEQ ID NO: 1545, or a corresponding segment of a Cas9 polypeptide amino acid sequence set forth in any of SEQ ID NOs: 1-259 and 795-1346. In some cases, the first fusion partner is inserted at amino acid 1012 of amino acids 910-1099 of the amino acid sequence of the S. pyogenes Cas9 amino acid sequence set forth in SEQ ID NO: 1545, or a corresponding segment of a Cas9 polypeptide amino acid sequence set forth in any of SEQ ID NOs: 1-259 and 795-1346. In some cases, the first fusion partner is inserted at amino acid 1013 of amino acids 910-1099 of the amino acid sequence of the S. pyogenes Cas9 amino acid sequence set forth in SEQ ID NO: 1545, or a corresponding segment of a Cas9 polypeptide amino acid sequence set forth in any of SEQ ID NOs: 1-259 and 795-1346. In some cases, the first fusion partner is inserted at amino acid 1014 of amino acids 910-1099 of the amino acid sequence of the S. pyogenes Cas9 amino acid sequence set forth in SEQ ID NO: 1545, or a corresponding segment of a Cas9 polypeptide amino acid sequence set forth in any of SEQ ID NOs: 1-259 and 795-1346. In some cases, the first fusion partner is inserted at amino acid 1015 of amino acids 910-1099 of the amino acid sequence of the S. pyogenes Cas9 amino acid sequence set forth in SEQ ID NO: 1545, or a corresponding segment of a Cas9 polypeptide amino acid sequence set forth in any of SEQ ID NOs: 1-259 and 795-1346. In some cases, the first fusion partner is inserted at amino acid 1017 of amino acids 910-1099 of the amino acid sequence of the S. pyogenes Cas9 amino acid sequence set forth in SEQ ID NO: 1545, or a corresponding segment of a Cas9 polypeptide amino acid sequence set forth in any of SEQ ID NOs: 1-259 and 795-1346. In some cases, the first fusion partner is inserted at amino acid 1018 of amino acids 910-1099 of the amino acid sequence of the S. pyogenes Cas9 amino acid sequence set forth in SEQ ID NO: 1545, or a corresponding segment of a Cas9 polypeptide amino acid sequence set forth in any of SEQ ID NOs: 1-259 and 795-1346. In some cases, the first fusion partner is inserted at amino acid 1019 of amino acids 910-1099 of the amino acid sequence of the S. pyogenes Cas9 amino acid sequence set forth in SEQ ID NO: 1545, or a corresponding segment of a Cas9 polypeptide amino acid sequence set forth in any of SEQ ID NOs: 1-259 and 795-1346. In some cases, the first fusion partner is inserted at amino acid 1020 of amino acids 910-1099 of the amino acid sequence of the S. pyogenes Cas9 amino acid sequence set forth in SEQ ID NO: 1545, or a corresponding segment of a Cas9 polypeptide amino acid sequence set forth in any of SEQ ID NOs: 1-259 and 795-1346. In some cases, the first fusion partner is inserted at amino acid 1021 of amino acids 910-1099 of the amino acid sequence of the S. pyogenes Cas9 amino acid sequence set forth in SEQ ID NO: 1545, or a corresponding segment of a Cas9 polypeptide amino acid sequence set forth in any of SEQ ID NOs: 1-259 and 795-1346. In some cases, the first fusion partner is inserted at amino acid 1022 of amino acids 910-1099 of the amino acid sequence of the S. pyogenes Cas9 amino acid sequence set forth in SEQ ID NO: 1545, or a corresponding segment of a Cas9 polypeptide amino acid sequence set forth in any of SEQ ID NOs: 1-259 and 795-1346. In some cases, the first fusion partner is inserted at amino acid 1023 of amino acids 910-1099 of the amino acid sequence of the S. pyogenes Cas9 amino acid sequence set forth in SEQ ID NO: 1545, or a corresponding segment of a Cas9 polypeptide amino acid sequence set forth in any of SEQ ID NOs: 1-259 and 795-1346. In some cases, the first fusion partner is inserted at amino acid 1024 of amino acids 910-1099 of the amino acid sequence of the S. pyogenes Cas9 amino acid sequence set forth in SEQ ID NO: 1545, or a corresponding segment of a Cas9 polypeptide amino acid sequence set forth in any of SEQ ID NOs: 1-259 and 795-1346. In some cases, the first fusion partner is inserted at amino acid 1025 of amino acids 910-1099 of the amino acid sequence of the S. pyogenes Cas9 amino acid sequence set forth in SEQ ID NO: 1545, or a corresponding segment of a Cas9 polypeptide amino acid sequence set forth in any of SEQ ID NOs: 1-259 and 795-1346.

[0383] As one non-limiting example, the first fusion polypeptide can comprise, in order from N-terminus to C-terminus: i) a RuvCI polypeptide; ii) a RuvCII polypeptide; iii) an HNH polypeptide; iv) an N-terminal portion of a RuvCIII polypeptide; v) a first fusion partner; vi) a C-terminal portion of a RuvCIII polypeptide; and v) a PAM-interacting polypeptide.

[0384] An N-terminal portion of a RuvCIII polypeptide can comprise an amino acid sequence having at least 75%, at least 80%, at least 85%, at least 90%, at least 95%, at least 98%, at least 99%, or 100%, amino acid sequence identity to a contiguous stretch of from 80 amino acids to 106 amino acids of amino acids 910 to 1015 of the S. pyogenes Cas9 amino acid sequence set forth in SEQ ID NO: 1545, or a corresponding segment of a Cas9 polypeptide amino acid sequence set forth in any of SEQ ID NOs: 1-259 and 795-1346; and can have a length of from 80 amino acids to 120 amino acids, from 80 amino acids to 90 amino acids, from 90 amino acids to 100 amino acids, from 100 amino acids to 110 amino acids,or from 110 amino acids to 120 amino acids. In some cases, a RuvCIII polypeptide comprises an amino acid sequence having at least 75%, at least 80%, at least 85%, at least 90%, at least 95%, at least 98%, at least 99%, or 100%, amino acid sequence identity to amino acids 910 to 1015 of the S. pyogenes Cas9 amino acid sequence set forth in SEQ ID NO: 1545, or a corresponding segment of a Cas9 polypeptide amino acid sequence set forth in any of SEQ ID NOs: 1-259 and 795-1346; and has a length of from 100 amino acids to 106 amino acids (e.g., 100, 101, 102, 103, 104, 105, 106, 107, 108, 109, or 110 amino acids).

[0385] A C-terminal portion of a RuvCIII polypeptide can comprise an amino acid sequence having at least 75%, at least 80%, at least 85%, at least 90%, at least 95%, at least 98%, at least 99%, or 100%, amino acid sequence identity to a contiguous stretch of from 75 amino acids to 84 amino acids of amino acids 1016 to 1099 of the S. pyogenes Cas9 amino acid sequence set forth in SEQ ID NO: 1545, or a corresponding segment of a Cas9 polypeptide amino acid sequence set forth in any of SEQ ID NOs: 1-259 and 795-1346; and can have a length of from 70 amino acids to 100 amino acids, from 70 amino acids to 80 amino acids, from 80 amino acids to 90 amino acids, or from 90 amino acids to 100 amino acids. In some cases, a C-terminal RuvCIII polypeptide comprises an amino acid sequence having at least 75%, at least 80%, at least 85%, at least 90%, at least 95%, at least 98%, at least 99%, or 100%, amino acid sequence identity to amino acids 1016 to 1099 of the S. pyogenes Cas9 amino acid sequence set forth in SEQ ID NO: 1545, or a corresponding segment of a Cas9 polypeptide amino acid sequence set forth in any of SEQ ID NOs: 1-259 and 795-1346; and has a length of from 80 amino acids to 90 amino acids (e.g., 80, 81, 82, 83, 84, 85, 86, 87, 88, 89, or 90 amino acids).

[0386] For example, in some cases, the first fusion polypeptide comprises, in order from N-terminus to C-terminus: i) a RuvCI polypeptide; ii) a RuvCII polypeptide; iii) an HNH polypeptide; iv) an N-terminal portion of a RuvCIII polypeptide, comprising an amino acid sequence having at least 75%, at least 80%, at least 85%, at least 90%, at least 95%, at least 98%, at least 99%, or 100%, amino acid sequence identity to amino acids 910 to 1010 of the S. pyogenes Cas9 amino acid sequence set forth in SEQ ID NO: 1545, or a corresponding segment of a Cas9 polypeptide amino acid sequence set forth in any of SEQ ID NOs: 1-259 and 795-1346; v) a first fusion partner; vi) a C-terminal portion of a RuvCIII polypeptide comprising an amino acid sequence having at least 75%, at least 80%, at least 85%, at least 90%, at least 95%, at least 98%, at least 99%, or 100%, amino acid sequence identity to amino acids 1011-1099 of the S. pyogenes Cas9 amino acid sequence set forth in SEQ ID NO: 1545, or a corresponding segment of a Cas9 polypeptide amino acid sequence set forth in any of SEQ ID NOs: 1-259 and 795-1346; and vii) a PAM-interacting polypeptide.

[0387] As another example, in some cases, the first fusion polypeptide comprises, in order from N-terminus to C-terminus: i) a RuvCI polypeptide; ii) a RuvCII polypeptide; iii) an HNH polypeptide; iv) an N-terminal portion of a RuvCIII polypeptide, comprising an amino acid sequence having at least 75%, at least 80%, at least 85%, at least 90%, at least 95%, at least 98%, at least 99%, or 100%, amino acid sequence identity to amino acids 910 to 1011 of the S. pyogenes Cas9 amino acid sequence set forth in SEQ ID NO: 1545, or a corresponding segment of a Cas9 polypeptide amino acid sequence set forth in any of SEQ ID NOs: 1-259 and 795-1346; v) a first fusion partner; vi) a C-terminal portion of a RuvCIII polypeptide comprising an amino acid sequence having at least 75%, at least 80%, at least 85%, at least 90%, at least 95%, at least 98%, at least 99%, or 100%, amino acid sequence identity to amino acids 1012-1099 of the S. pyogenes Cas9 amino acid sequence set forth in SEQ ID NO: 1545, or a corresponding segment of a Cas9 polypeptide amino acid sequence set forth in any of SEQ ID NOs: 1-259 and 795-1346; and vii) a PAM-interacting polypeptide.

[0388] As another example, in some cases, the first fusion polypeptide comprises, in order from N-terminus to C-terminus: i) a RuvCI polypeptide; ii) a RuvCII polypeptide; iii) an HNH polypeptide; iv) an N-terminal portion of a RuvCIII polypeptide, comprising an amino acid sequence having at least 75%, at least 80%, at least 85%, at least 90%, at least 95%, at least 98%, at least 99%, or 100%, amino acid sequence identity to amino acids 910 to 1012 of the S. pyogenes Cas9 amino acid sequence set forth in SEQ ID NO: 1545, or a corresponding segment of a Cas9 polypeptide amino acid sequence set forth in any of SEQ ID NOs: 1-259 and 795-1346; v) a first fusion partner; vi) a C-terminal portion of a RuvCIII polypeptide comprising an amino acid sequence having at least 75%, at least 80%, at least 85%, at least 90%, at least 95%, at least 98%, at least 99%, or 100%, amino acid sequence identity to amino acids 1013-1099 of the S. pyogenes Cas9 amino acid sequence set forth in SEQ ID NO: 1545, or a corresponding segment of a Cas9 polypeptide amino acid sequence set forth in any of SEQ ID NOs: 1-259 and 795-1346; and vii) a PAM-interacting polypeptide.

[0389] As another example, in some cases, the first fusion polypeptide comprises, in order from N-terminus to C-terminus: i) a RuvCI polypeptide; ii) a RuvCII polypeptide; iii) an HNH polypeptide; iv) an N-terminal portion of a RuvCIII polypeptide, comprising an amino acid sequence having at least 75%, at least 80%, at least 85%, at least 90%, at least 95%, at least 98%, at least 99%, or 100%, amino acid sequence identity to amino acids 910 to 1013 of the S. pyogenes Cas9 amino acid sequence set forth in SEQ ID NO: 1545, or a corresponding segment of a Cas9 polypeptide amino acid sequence set forth in any of SEQ ID NOs: 1-259 and 795-1346; v) a first fusion partner; vi) a C-terminal portion of a RuvCIII polypeptide comprising an amino acid sequence having at least 75%, at least 80%, at least 85%, at least 90%, at least 95%, at least 98%, at least 99%, or 100%, amino acid sequence identity to amino acids 1014-1099 of the S. pyogenes Cas9 amino acid sequence set forth in SEQ ID NO: 1545, or a corresponding segment of a Cas9 polypeptide amino acid sequence set forth in any of SEQ ID NOs: 1-259 and 795-1346; and vii) a PAM-interacting polypeptide.

[0390] As another example, in some cases, the first fusion polypeptide comprises, in order from N-terminus to C-terminus: i) a RuvCI polypeptide; ii) a RuvCII polypeptide; iii) an HNH polypeptide; iv) an N-terminal portion of a RuvCIII polypeptide, comprising an amino acid sequence having at least 75%, at least 80%, at least 85%, at least 90%, at least 95%, at least 98%, at least 99%, or 100%, amino acid sequence identity to amino acids 910 to 1014 of the S. pyogenes Cas9 amino acid sequence set forth in SEQ ID NO: 1545, or a corresponding segment of a Cas9 polypeptide amino acid sequence set forth in any of SEQ ID NOs: 1-259 and 795-1346; v) a first fusion partner; vi) a C-terminal portion of a RuvCIII polypeptide comprising an amino acid sequence having at least 75%, at least 80%, at least 85%, at least 90%, at least 95%, at least 98%, at least 99%, or 100%, amino acid sequence identity to amino acids 1015-1099 of the S. pyogenes Cas9 amino acid sequence set forth in SEQ ID NO: 1545, or a corresponding segment of a Cas9 polypeptide amino acid sequence set forth in any of SEQ ID NOs: 1-259 and 795-1346; and vii) a PAM-interacting polypeptide.

[0391] As another example, in some cases, the first fusion polypeptide comprises, in order from N-terminus to C-terminus: i) a RuvCI polypeptide; ii) a RuvCII polypeptide; iii) an HNH polypeptide; iv) an N-terminal portion of a RuvCIII polypeptide, comprising an amino acid sequence having at least 75%, at least 80%, at least 85%, at least 90%, at least 95%, at least 98%, at least 99%, or 100%, amino acid sequence identity to amino acids 910 to 1015 of the S. pyogenes Cas9 amino acid sequence set forth in SEQ ID NO: 1545, or a corresponding segment of a Cas9 polypeptide amino acid sequence set forth in any of SEQ ID NOs: 1-259 and 795-1346; v) a first fusion partner; vi) a C-terminal portion of a RuvCIII polypeptide comprising an amino acid sequence having at least 75%, at least 80%, at least 85%, at least 90%, at least 95%, at least 98%, at least 99%, or 100%, amino acid sequence identity to amino acids 1016-1099 of the S. pyogenes Cas9 amino acid sequence set forth in SEQ ID NO: 1545, or a corresponding segment of a Cas9 polypeptide amino acid sequence set forth in any of SEQ ID NOs: 1-259 and 795-1346; and vii) a PAM-interacting polypeptide.

[0392] As another example, in some cases, the first fusion polypeptide comprises, in order from N-terminus to C-terminus: i) a RuvCI polypeptide; ii) a RuvCII polypeptide; iii) an HNH polypeptide; iv) an N-terminal portion of a RuvCIII polypeptide, comprising an amino acid sequence having at least 75%, at least 80%, at least 85%, at least 90%, at least 95%, at least 98%, at least 99%, or 100%, amino acid sequence identity to amino acids 910 to 1016 of the S. pyogenes Cas9 amino acid sequence set forth in SEQ ID NO: 1545, or a corresponding segment of a Cas9 polypeptide amino acid sequence set forth in any of SEQ ID NOs: 1-259 and 795-1346; v) a first fusion partner; vi) a C-terminal portion of a RuvCIII polypeptide comprising an amino acid sequence having at least 75%, at least 80%, at least 85%, at least 90%, at least 95%, at least 98%, at least 99%, or 100%, amino acid sequence identity to amino acids 1017-1099 of the S. pyogenes Cas9 amino acid sequence set forth in SEQ ID NO: 1545, or a corresponding segment of a Cas9 polypeptide amino acid sequence set forth in any of SEQ ID NOs: 1-259 and 795-1346; and vii) a PAM-interacting polypeptide.

[0393] As another example, in some cases, the first fusion polypeptide comprises, in order from N-terminus to C-terminus: i) a RuvCI polypeptide; ii) a RuvCII polypeptide; iii) an HNH polypeptide; iv) an N-terminal portion of a RuvCIII polypeptide, comprising an amino acid sequence having at least 75%, at least 80%, at least 85%, at least 90%, at least 95%, at least 98%, at least 99%, or 100%, amino acid sequence identity to amino acids 910 to 1017 of the S. pyogenes Cas9 amino acid sequence set forth in SEQ ID NO: 1545, or a corresponding segment of a Cas9 polypeptide amino acid sequence set forth in any of SEQ ID NOs: 1-259 and 795-1346; v) a first fusion partner; vi) a C-terminal portion of a RuvCIII polypeptide comprising an amino acid sequence having at least 75%, at least 80%, at least 85%, at least 90%, at least 95%, at least 98%, at least 99%, or 100%, amino acid sequence identity to amino acids 1018-1099 of the S. pyogenes Cas9 amino acid sequence set forth in SEQ ID NO: 1545, or a corresponding segment of a Cas9 polypeptide amino acid sequence set forth in any of SEQ ID NOs: 1-259 and 795-1346; and vii) a PAM-interacting polypeptide.

[0394] As another example, in some cases, the first fusion polypeptide comprises, in order from N-terminus to C-terminus: i) a RuvCI polypeptide; ii) a RuvCII polypeptide; iii) an HNH polypeptide; iv) an N-terminal portion of a RuvCIII polypeptide, comprising an amino acid sequence having at least 75%, at least 80%, at least 85%, at least 90%, at least 95%, at least 98%, at least 99%, or 100%, amino acid sequence identity to amino acids 910 to 1018 of the S. pyogenes Cas9 amino acid sequence set forth in SEQ ID NO: 1545, or a corresponding segment of a Cas9 polypeptide amino acid sequence set forth in any of SEQ ID NOs: 1-259 and 795-1346; v) a first fusion partner; vi) a C-terminal portion of a RuvCIII polypeptide comprising an amino acid sequence having at least 75%, at least 80%, at least 85%, at least 90%, at least 95%, at least 98%, at least 99%, or 100%, amino acid sequence identity to amino acids 1019-1099 of the S. pyogenes Cas9 amino acid sequence set forth in SEQ ID NO: 1545, or a corresponding segment of a Cas9 polypeptide amino acid sequence set forth in any of SEQ ID NOs: 1-259 and 795-1346; and vii) a PAM-interacting polypeptide.

[0395] As another example, in some cases, the first fusion polypeptide comprises, in order from N-terminus to C-terminus: i) a RuvCI polypeptide; ii) a RuvCII polypeptide; iii) an HNH polypeptide; iv) an N-terminal portion of a RuvCIII polypeptide, comprising an amino acid sequence having at least 75%, at least 80%, at least 85%, at least 90%, at least 95%, at least 98%, at least 99%, or 100%, amino acid sequence identity to amino acids 910 to 1019 of the S. pyogenes Cas9 amino acid sequence set forth in SEQ ID NO: 1545, or a corresponding segment of a Cas9 polypeptide amino acid sequence set forth in any of SEQ ID NOs: 1-259 and 795-1346; v) a first fusion partner; vi) a C-terminal portion of a RuvCIII polypeptide comprising an amino acid sequence having at least 75%, at least 80%, at least 85%, at least 90%, at least 95%, at least 98%, at least 99%, or 100%, amino acid sequence identity to amino acids 1020-1099 of the S. pyogenes Cas9 amino acid sequence set forth in SEQ ID NO: 1545, or a corresponding segment of a Cas9 polypeptide amino acid sequence set forth in any of SEQ ID NOs: 1-259 and 795-1346; and vii) a PAM-interacting polypeptide.

[0396] As another example, in some cases, the first fusion polypeptide comprises, in order from N-terminus to C-terminus: i) a RuvCI polypeptide; ii) a RuvCII polypeptide; iii) an HNH polypeptide; iv) an N-terminal portion of a RuvCIII polypeptide, comprising an amino acid sequence having at least 75%, at least 80%, at least 85%, at least 90%, at least 95%, at least 98%, at least 99%, or 100%, amino acid sequence identity to amino acids 910 to 1020 of the S. pyogenes Cas9 amino acid sequence set forth in SEQ ID NO: 1545, or a corresponding segment of a Cas9 polypeptide amino acid sequence set forth in any of SEQ ID NOs: 1-259 and 795-1346; v) a first fusion partner; vi) a C-terminal portion of a RuvCIII polypeptide comprising an amino acid sequence having at least 75%, at least 80%, at least 85%, at least 90%, at least 95%, at least 98%, at least 99%, or 100%, amino acid sequence identity to amino acids 1021-1099 of the S. pyogenes Cas9 amino acid sequence set forth in SEQ ID NO: 1545, or a corresponding segment of a Cas9 polypeptide amino acid sequence set forth in any of SEQ ID NOs: 1-259 and 795-1346; and vii) a PAM-interacting polypeptide.

[0397] As another example, in some cases, the first fusion polypeptide comprises, in order from N-terminus to C-terminus: i) a RuvCI polypeptide; ii) a RuvCII polypeptide; iii) an HNH polypeptide; iv) an N-terminal portion of a RuvCIII polypeptide, comprising an amino acid sequence having at least 75%, at least 80%, at least 85%, at least 90%, at least 95%, at least 98%, at least 99%, or 100%, amino acid sequence identity to amino acids 910 to 1021 of the S. pyogenes Cas9 amino acid sequence set forth in SEQ ID NO: 1545, or a corresponding segment of a Cas9 polypeptide amino acid sequence set forth in any of SEQ ID NOs: 1-259 and 795-1346; v) a first fusion partner; vi) a C-terminal portion of a RuvCIII polypeptide comprising an amino acid sequence having at least 75%, at least 80%, at least 85%, at least 90%, at least 95%, at least 98%, at least 99%, or 100%, amino acid sequence identity to amino acids 1022-1099 of the S. pyogenes Cas9 amino acid sequence set forth in SEQ ID NO: 1545, or a corresponding segment of a Cas9 polypeptide amino acid sequence set forth in any of SEQ ID NOs: 1-259 and 795-1346; and vii) a PAM-interacting polypeptide.

[0398] As another example, in some cases, the first fusion polypeptide comprises, in order from N-terminus to C-terminus: i) a RuvCI polypeptide; ii) a RuvCII polypeptide; iii) an HNH polypeptide; iv) an N-terminal portion of a RuvCIII polypeptide, comprising an amino acid sequence having at least 75%, at least 80%, at least 85%, at least 90%, at least 95%, at least 98%, at least 99%, or 100%, amino acid sequence identity to amino acids 910 to 1022 of the S. pyogenes Cas9 amino acid sequence set forth in SEQ ID NO: 1545, or a corresponding segment of a Cas9 polypeptide amino acid sequence set forth in any of SEQ ID NOs: 1-259 and 795-1346; v) a first fusion partner; vi) a C-terminal portion of a RuvCIII polypeptide comprising an amino acid sequence having at least 75%, at least 80%, at least 85%, at least 90%, at least 95%, at least 98%, at least 99%, or 100%, amino acid sequence identity to amino acids 1023-1099 of the S. pyogenes Cas9 amino acid sequence set forth in SEQ ID NO: 1545, or a corresponding segment of a Cas9 polypeptide amino acid sequence set forth in any of SEQ ID NOs: 1-259 and 795-1346; and vii) a PAM-interacting polypeptide.

[0399] As another example, in some cases, the first fusion polypeptide comprises, in order from N-terminus to C-terminus: i) a RuvCI polypeptide; ii) a RuvCII polypeptide; iii) an HNH polypeptide; iv) an N-terminal portion of a RuvCIII polypeptide, comprising an amino acid sequence having at least 75%, at least 80%, at least 85%, at least 90%, at least 95%, at least 98%, at least 99%, or 100%, amino acid sequence identity to amino acids 910 to 1023 of the S. pyogenes Cas9 amino acid sequence set forth in SEQ ID NO: 1545, or a corresponding segment of a Cas9 polypeptide amino acid sequence set forth in any of SEQ ID NOs: 1-259 and 795-1346; v) a first fusion partner; vi) a C-terminal portion of a RuvCIII polypeptide comprising an amino acid sequence having at least 75%, at least 80%, at least 85%, at least 90%, at least 95%, at least 98%, at least 99%, or 100%, amino acid sequence identity to amino acids 1024-1099 of the S. pyogenes Cas9 amino acid sequence set forth in SEQ ID NO: 1545, or a corresponding segment of a Cas9 polypeptide amino acid sequence set forth in any of SEQ ID NOs: 1-259 and 795-1346; and vii) a PAM-interacting polypeptide.

[0400] As another example, in some cases, the first fusion polypeptide comprises, in order from N-terminus to C-terminus: i) a RuvCI polypeptide; ii) a RuvCII polypeptide; iii) an HNH polypeptide; iv) an N-terminal portion of a RuvCIII polypeptide, comprising an amino acid sequence having at least 75%, at least 80%, at least 85%, at least 90%, at least 95%, at least 98%, at least 99%, or 100%, amino acid sequence identity to amino acids 910 to 1024 of the S. pyogenes Cas9 amino acid sequence set forth in SEQ ID NO: 1545, or a corresponding segment of a Cas9 polypeptide amino acid sequence set forth in any of SEQ ID NOs: 1-259 and 795-1346; v) a first fusion partner; vi) a C-terminal portion of a RuvCIII polypeptide comprising an amino acid sequence having at least 75%, at least 80%, at least 85%, at least 90%, at least 95%, at least 98%, at least 99%, or 100%, amino acid sequence identity to amino acids 1025-1099 of the S. pyogenes Cas9 amino acid sequence set forth in SEQ ID NO: 1545, or a corresponding segment of a Cas9 polypeptide amino acid sequence set forth in any of SEQ ID NOs: 1-259 and 795-1346; and vii) a PAM-interacting polypeptide.

[0401] Second Fusion Polypeptide

[0402] In some cases, the second polypeptide of a Cas9 heterodimer comprises an a-helical lobe (also referred to as “an alpha-helical recognition region”) of a Cas9 polypeptide. For example, in some cases, the second polypeptide comprises an amino acid sequence having at least 75%, at least 80%, at least 85%, at least 90%, at least 95%, at least 98%, at least 99%, or 100%, amino acid sequence identity to a contiguous stretch of from 400 amino acids to 658 amino acids of amino acids 61 to 718 of the S. pyogenes Cas9 amino acid sequence set forth in SEQ ID NO: 1545, or a corresponding segment of a Cas9 polypeptide amino acid sequence set forth in any of SEQ ID NOs: 1-259 and 795-1346; and can have a length of from 400 amino acids to 800 amino acids, e.g., from 400 amino acids to 450 amino acids, from 450 amino acids to 500 amino acids, from 500 amino acids to 550 amino acids, from 550 amino acids to 600 amino acids, from 600 amino acids to 650 amino acids, from 650 amino acids to 700 amino acids, from 700 amino acids to 750 amino acids, or from 750 amino acids to 800 amino acids. In some cases, the second polypeptide comprises an amino acid sequence having at least 75%, at least 80%, at least 85%, at least 90%, at least 95%, at least 98%, at least 99%, or 100%, amino acid sequence identity to amino acids 61-718 of the S. pyogenes Cas9 amino acid sequence set forth in SEQ ID NO: 1545, or a corresponding segment of a Cas9 polypeptide amino acid sequence set forth in any of SEQ ID NOs: 1-259 and 795-1346; and has a length of from 650 amino acids to 660 amino acids (e.g., 650, 651, 652, 653, 654, 655, 656, 657, 658, 659, or 660 amino acids).

[0403] In some cases, the second polypeptide comprises an amino acid sequence having at least 75%, at least 80%, at least 85%, at least 90%, at least 95%, at least 98%, at least 99%, or 100%, amino acid sequence identity to a contiguous stretch of from 400 amino acids to 624 amino acids of amino acids 95 to 718 of the S. pyogenes Cas9 amino acid sequence set forth in SEQ ID NO: 1545, or a corresponding segment of a Cas9 polypeptide amino acid sequence set forth in any of SEQ ID NOs: 1-259 and 795-1346; and has a length of from about 400 amino acids to 800 amino acids, e.g., from 400 amino acids to 450 amino acids, from 450 amino acids to 500 amino acids, from 500 amino acids to 550 amino acids, from 550 amino acids to 600 amino acids, from 600 amino acids to 650 amino acids, from 650 amino acids to 700 amino acids, from 700 amino acids to 750 amino acids, or from 750 amino acids to 800 amino acids. In some cases, the second polypeptide comprises an amino acid sequence having at least 75%, at least 80%, at least 85%, at least 90%, at least 95%, at least 98%, at least 99%, or 100%, amino acid sequence identity to amino acids 95 to 718 of the S. pyogenes Cas9 amino acid sequence set forth in SEQ ID NO: 1545, or a corresponding segment of a Cas9 polypeptide amino acid sequence set forth in any of SEQ ID NOs: 1-259 and 795-1346; and has a length of from 620 amino acids to 630 amino acids (e.g., 620, 621, 622, 623, 624, 625, 626, 627, 628, 629, or 630 amino acids).

[0404] In some cases, G56 (of the S. pyogenes sequence set forth in SEQ ID NO: 1545) can be selected as the N-terminus for the alpha-helical lobe (e.g., due to its location in a poorly-conserved linker just before the arginine-rich bridge helix, which has been shown to be critical for Cas9 cleavage activity in human cells). In some cases, the second polypeptide of a Cas9 heterodimer comprises an a-helical lobe (also referred to as “an alpha-helical recognition region”) of a Cas9 polypeptide. For example, in some cases, the second polypeptide comprises an amino acid sequence having at least 75%, at least 80%, at least 85%, at least 90%, at least 95%, at least 98%, at least 99%, or 100%, amino acid sequence identity to a contiguous stretch of from 400 amino acids to 658 amino acids of amino acids 56 to 714 of the S. pyogenes Cas9 amino acid sequence set forth in SEQ ID NO: 1545, or a corresponding segment of a Cas9 polypeptide amino acid sequence set forth in any of SEQ ID NOs: 1-259 and 795-1346; and can have a length of from 400 amino acids to 800 amino acids, e.g., from 400 amino acids to 450 amino acids, from 450 amino acids to 500 amino acids, from 500 amino acids to 550 amino acids, from 550 amino acids to 600 amino acids, from 600 amino acids to 650 amino acids, from 650 amino acids to 700 amino acids, from 700 amino acids to 750 amino acids, or from 750 amino acids to 800 amino acids. In some cases, the second polypeptide comprises an amino acid sequence having at least 75%, at least 80%, at least 85%, at least 90%, at least 95%, at least 98%, at least 99%, or 100%, amino acid sequence identity to amino acids 56-714 of the S. pyogenes Cas9 amino acid sequence set forth in SEQ ID NO: 1545, or a corresponding segment of a Cas9 polypeptide amino acid sequence set forth in any of SEQ ID NOs: 1-259 and 795-1346; and has a length of from 650 amino acids to 660 amino acids (e.g., 650, 651, 652, 653, 654, 655, 656, 657, 658, 659, or 660 amino acids).

[0405] In some cases, the C-terminus of the alpha-helical lobe can be at the beginning, end, or within the linker between the two lobes of the WT Cas9 protein. For example, the C-terminus of the alpha-helical lobe can be at or near 5714 of the WT Cas9 protein set forth in SEQ I D NO: 1545. For example, the C-terminus of the alpha-helical lobe can be 5714 of the WT Cas9 protein set forth in SEQ ID NO: 1545.

[0406] In some cases, the second fusion polypeptide comprises, in order from N-terminus to C-terminus: a) a second fusion partner; and b) a second polypeptide that comprises an alpha-helical recognition region. In some cases, the second fusion polypeptide comprises, in order from N-terminus to C-terminus: a) a second polypeptide that comprises an alpha-helical recognition region; and b) a second fusion partner.

[0407] In some cases, the second fusion polypeptide comprises a heterologous sequence that provides for subcellular localization (e.g., an NLS for targeting to the nucleus; a mitochondrial localization signal for targeting to the mitochondria; a chloroplast localization signal for targeting to a chloroplast; an ER retention signal; and the like). In some cases, the second fusion polypeptide includes 2 or more, 3 or more, 4 or more, or 5 or more NLSs. In some cases, an NLS is located at or near (e.g., within 75 amino acids, 50 amino acids, or 30 amino acids) the N-terminus and/or at or near (e.g., within 75 amino acids, 50 amino acids, or 30 amino acids) the C-terminus.

[0408] In some cases, the second fusion polypeptide comprises an NLS. For example, in some cases, the second fusion polypeptide comprises, in order from N-terminus to C-terminus: a) an NLS; b) a second fusion partner; and c) a second polypeptide that comprises an alpha-helical recognition region. In some cases, the second fusion polypeptide comprises, in order from N-terminus to C-terminus: a) an NLS; b) a second fusion partner; c) a second polypeptide that comprises an alpha-helical recognition region; and d) an NLS. In some cases, the second fusion polypeptide comprises, in order from N-terminus to C-terminus: a) an NLS; b) a second polypeptide that comprises an alpha-helical recognition region; and c) a second fusion partner. In some cases, the second fusion polypeptide comprises, in order from N-terminus to C-terminus: a) an NLS; b) a second polypeptide that comprises an alpha-helical recognition region; c) a second fusion partner; and d) an NLS. In some cases, the NLS comprises the amino acid sequence MAPKKKRKVGIHGVPAA (SEQ ID NO: 1546). In some cases, the NLS comprises the amino acid sequence KRPAATKKAGQAKKKK (SEQ ID NO: 1547). Other suitable NLS are described elsewhere herein.

[0409] An NLS can be at or near the N-terminus and/or the C-terminus. In some cases, the second fusion polypeptide comprises two or more NLSs (e.g., 3 or more, 4 or more, or 5 or more NLSs). In some cases, the second fusion polypeptide comprises one or more NLSs (e.g., 2 or more, 3 or more, or 4 or more NLSs) at or near the N-terminus and/or one or more NLSs (e.g., 2 or more, 3 or more, or 4 or more NLSs) at or near the C-terminus. The term “at or near” is used here because, as is known in the art, the NLS need not be at the actual terminus of a protein, but can be positioned near (e.g., within 100 amino acids of) an N- and/or C-terminus (e.g., within 80, within 75, within 60, within 55, within 50, within 45, within 40, within 35, or within 30 amino acids of the an N- and/or C-terminus).

[0410] In some cases, the second fusion polypeptide comprises one or more linker polypeptides. For example, a linker polypeptide can be interposed between any of: a) an NLS and a fusion partner; b) a fusion partner and an alpha-helical lobe; and c) an alpha-helical lobe and an NLS. Suitable linker polypeptides are described elsewhere herein.

[0411] Cas9 Heterodimer Comprising a Circularly Permuted Polypeptide

[0412] In some embodiments, the Cas9 nuclease lobe of a Cas9 heterodimer is a circular permutant. As used herein, the term “circular permutant” refers to a variant polypeptide (e.g., of a subject Cas9 heterodimer) in which one section of the primary amino acid sequence has been moved to a different position within the primary amino acid sequence of the polypeptide, but where the local order of amino acids has not been changed, and where the three dimensional architecture of the protein is conserved. For example, a circular permutant of a wild type 500 amino acid polypeptide may have an N-terminal residue of residue number 50 (relative to the wild type protein), where residues 1-49 of the wild type protein are added the C-terminus. Such a circular permutant, relative to the wild type protein sequence would have, from N-terminus to C-terminus, amino acid numbers 50-500 followed by 1-49 (amino acid 49 would be the C-terminal residue). Thus, such an example circular permutant would have the same total number of amino acids as the wild type reference protein, and the amino acids would even be in the same order (locally), but the overall primary amino acid sequence is changed.

[0413] In some embodiments, a Cas9 heterodimer comprises: a) a first, circularly permuted, polypeptide comprising: a RuvCI polypeptide; ii) a RuvCII polypeptide; iii) an HNH polypeptide; iv) a RuvCIII polypeptide; and v) a PAM-interacting polypeptide; where the first polypeptide comprises a first member of a dimerization pair; and b) a second polypeptide comprising an alpha-helical recognition region and a second member of a dimerization pair.

[0414] For example, in some cases, a Cas9 heterodimer comprises: A) a first fusion polypeptide comprising: a) a first, circular permuted, polypeptide that comprises: i) a RuvCI polypeptide; ii) a RuvCII polypeptide; iii) an HNH polypeptide; iv) a RuvCIII polypeptide; and v) a PAM-interacting polypeptide; and b) a first fusion partner, where the first fusion partner is a first member of a dimerization pair; and B) a second fusion polypeptide comprising: a) a second polypeptide that comprises an alpha-helical recognition region; and b) a second fusion partner, where the second fusion partner is a second member of the dimerization pair.

[0415] First Fusion Polypeptide

[0416] As described above, a Cas9 heterodimer comprises: A) a first fusion polypeptide comprising: a) a first, circular permuted, polypeptide that comprises: i) a RuvCI polypeptide; ii) a RuvCII polypeptide; iii) an HNH polypeptide; iv) a RuvCIII polypeptide; and v) a PAM-interacting polypeptide; and b) a first fusion partner, where the first fusion partner is a first member of a dimerization pair; and B) a second fusion polypeptide comprising: a) a second polypeptide that comprises an alpha-helical recognition region; and b) a second fusion partner, where the second fusion partner is a second member of the dimerization pair. In some cases, the first fusion partner (first member of the dimerization pair) is covalently linked, directly or via a linker, at or near (e.g., within 1 to 50 amino acids of) the amino terminus (N-terminus) of the first, circular permuted, polypeptide. In some cases, the first member of the dimerization pair is covalently linked, directly or via a linker, at or near (e.g., within 1 to 50 amino acids of) the carboxyl terminus (C-terminus) of the first, circular permuted, polypeptide. In some cases, the first polypeptide comprises a nuclease lobe of a Cas9 polypeptide.

[0417] In some cases, a first fusion polypeptide comprises one or more linker polypeptides. A linker polypeptide can be interposed between any of the various possible components (polypeptides) of a first fusion polypeptide. Examples of suitable positions for a linker polypeptide include, but are not limited to, interposed between: a) an NLS and a fusion partner; b) a fusion partner and a RuvCII polypeptide; c) a PAM-interacting polypeptide and a RuvCI polypeptide; d) a RuvCI polypeptide and an NLS; e) a RuvCI polypeptide and a fusion partner; and f) a RuvCI polypeptide and a RuvCII polypeptide.

[0418] The linker polypeptide may have any of a variety of amino acid sequences. Proteins can be joined by a spacer peptide, generally of a flexible nature, although other chemical linkages are not excluded. Currently, it is contemplated that the most useful linker sequences will generally be peptides of between about 6 and about 40 amino acids in length, or between about 6 and about 25 amino acids in length. These linkers are generally produced by using synthetic, linker-encoding oligonucleotides to couple the proteins. Peptide linkers with a degree of flexibility will generally be preferred. The linking peptides may have virtually any amino acid sequence, bearing in mind that the preferred linkers will have a sequence that results in a generally flexible peptide. The use of small amino acids, such as glycine and alanine, are of use in creating a flexible peptide. The creation of such sequences is routine to those of skill in the art. A variety of different linkers are commercially available and are considered suitable for use.

[0419] Exemplary polypeptide linkers include glycine polymers (G)ₙ, glycine-serine polymers (including, for example, (GS)ₙ, GSGGSₙ (SEQ ID NO: 1548) and GGGSₙ (SEQ ID NO: 1549), where n is an integer of at least one), glycine-alanine polymers, alanine-serine polymers. Exemplary linkers can comprise amino acid sequences including, but not limited to, GGSG (SEQ ID NO: 1550), GGSGG (SEQ ID NO: 1551), GSGSG (SEQ ID NO: 1552), GSGGG (SEQ ID NO: 1553), GGGSG (SEQ ID NO: 1554), GSSSG (SEQ ID NO: 1555), and the like. The ordinarily skilled artisan will recognize that design of a peptide conjugated to any elements described above can include linkers that are all or partially flexible, such that the linker can include a flexible linker as well as one or more portions that confer less flexible structure.

[0420] Cas9 Nuclease Lobe Circular Permutant 1

[0421] In some cases, the first fusion polypeptide comprises, in order from N-terminus to C-terminus: a) a first fusion partner; and b) a first polypeptide comprising: i) a RuvCII polypeptide; ii) an HNH polypeptide; iii) a RuvCIII polypeptide; iv) a PAM-interacting polypeptide; and v) a RuvCI polypeptide. In some cases, the first fusion polypeptide comprises, in order from N-terminus to C-terminus: a) a first polypeptide comprising: i) a RuvCII polypeptide; ii) an HNH polypeptide; iii) a RuvCIII polypeptide; iv) a PAM-interacting polypeptide; and v) a RuvCI polypeptide; and b) a first fusion partner. In some cases, the first fusion partner is a first member of a dimerization pair. Suitable first members of a dimerization pair are described herein.

[0422] In some cases, the first fusion polypeptide comprises a heterologous sequence that provides for subcellular localization (e.g., a nuclear localization signal (NLS) for targeting to the nucleus; a mitochondrial localization signal for targeting to the mitochondria; a chloroplast localization signal for targeting to a chloroplast; an ER retention signal; and the like). In some cases, the first fusion polypeptide includes 2 or more, 3 or more, 4 or more, or 5 or more NLSs. In some cases, an NLS is located at or near (e.g., within 75 amino acids, 50 amino acids, or 30 amino acids) the N-terminus and/or at or near (e.g., within 75 amino acids, 50 amino acids, or 30 amino acids) the C-terminus. In some cases, the first fusion polypeptide comprises a nuclear localization signal (NLS). For example, in some cases, the first fusion polypeptide comprises, in order from N-terminus to C-terminus: a) an NLS; b) a first fusion partner; and c) a first polypeptide comprising: i) a RuvCII polypeptide; ii) an HNH polypeptide; iii) a RuvCIII polypeptide; iv) a PAM-interacting polypeptide; and v) a RuvCI polypeptide. In some cases, the first fusion polypeptide comprises, in order from N-terminus to C-terminus: a) an NLS; b) a first fusion partner; c) a first polypeptide comprising: i) a RuvCII polypeptide; ii) an HNH polypeptide; iii) a RuvCIII polypeptide; iv) a PAM-interacting polypeptide; and v) a RuvCI polypeptide; and d) an NLS. In some cases, the first fusion polypeptide comprises, in order from N-terminus to C-terminus: a) an NLS; b) a first polypeptide comprising: i) a RuvCII polypeptide; ii) an HNH polypeptide; iii) a RuvCIII polypeptide; iv) a PAM-interacting polypeptide; and v) a RuvCI polypeptide; and c) a first fusion partner. In some cases, the first fusion polypeptide comprises, in order from N-terminus to C-terminus: a) a first polypeptide comprising: i) a RuvCII polypeptide; ii) an HNH polypeptide; iii) a RuvCIII polypeptide; iv) a PAM-interacting polypeptide; and v) a RuvCI polypeptide; b) a first fusion partner; and c) an NLS. In some cases, the first fusion polypeptide comprises, in order from N-terminus to C-terminus: a) a first fusion partner; b a first polypeptide comprising: i) a RuvCII polypeptide; ii) an HNH polypeptide; iii) a RuvCIII polypeptide; iv) a PAM-interacting polypeptide; and v) a RuvCI polypeptide; and c) an NLS. In some cases, the first fusion partner is a first member of a dimerization pair. In some cases, the NLS comprises the amino acid sequence MAPKKKRKVGIHGVPAA (SEQ ID NO: 1546). In some cases, the NLS comprises the amino acid sequence KRPAATKKAGQAKKKK (SEQ ID NO: 1547). Other suitable NLS are described elsewhere herein.

[0423] An NLS can be at or near the N-terminus and/or the C-terminus. In some cases, the first fusion polypeptide comprises two or more NLSs (e.g., 3 or more, 4 or more, or 5 or more NLSs). In some cases, the first fusion polypeptide comprises one or more NLSs (e.g., 2 or more, 3 or more, or 4 or more NLSs) at or near the N-terminus and/or one or more NLSs (e.g., 2 or more, 3 or more, or 4 or more NLSs) at or near the C-terminus. The term “at or near” is used here because, as is known in the art, the NLS need not be at the actual terminus of a protein, but can be positioned near (e.g., within 100 amino acids of) an N- and/or C-terminus (e.g., within 80, within 75, within 60, within 55, within 50, within 45, within 40, within 35, or within 30 amino acids of the an N- and/or C-terminus).

[0424] A RuvCII polypeptide can comprise an amino acid sequence having at least 75%, at least 80%, at least 85%, at least 90%, at least 95%, at least 98%, at least 99%, or 100%, amino acid sequence identity to a contiguous stretch of from 40 to 57 amino acids of amino acids 718-774 of the S. pyogenes Cas9 amino acid sequence set forth in SEQ ID NO: 1545, or a corresponding segment of a Cas9 polypeptide amino acid sequence set forth in any of SEQ ID NOs: 1-259 and 795-1346; and can have a length of from 40 amino acids to about 70 amino acids, e.g., from 40 amino acids to 45 amino acids, from 45 amino acids to 50 amino acids, from 50 amino acids to 55 amino acids, from 55 amino acids to 60 amino acids, from 60 amino acids to 65 amino acids, or from 65 amino acids to 70 amino acids. In some cases, a RuvCII polypeptide comprises an amino acid sequence having at least 75%, at least 80%, at least 85%, at least 90%, at least 95%, at least 98%, at least 99%, or 100%, amino acid sequence identity to amino acids 718-774 of the S. pyogenes Cas9 amino acid sequence set forth in SEQ ID NO: 1545, or a corresponding segment of a Cas9 polypeptide amino acid sequence set forth in any of SEQ ID NOs: 1-259 and 795-1346; and has a length of 55-60 (e.g., 55, 56, 57, 58, 59, or 60) amino acids.

[0425] A RuvCII polypeptide can comprise an amino acid sequence having at least 75%, at least 80%, at least 85%, at least 90%, at least 95%, at least 98%, at least 99%, or 100%, amino acid sequence identity to a contiguous stretch of from 40 to 46 amino acids of amino acids 729-775 of the S. pyogenes Cas9 amino acid sequence set forth in SEQ ID NO: 1545, or a corresponding segment of a Cas9 polypeptide amino acid sequence set forth in any of SEQ ID NOs: 1-259 and 795-1346; and can have a length of from 40 amino acids to about 60 amino acids, e.g., from 40 amino acids to 45 amino acids, from 45 amino acids to 50 amino acids, from 50 amino acids to 55 amino acids, or from 55 amino acids to 60 amino acids. In some cases, a RuvCII polypeptide comprises an amino acid sequence having at least 75%, at least 80%, at least 85%, at least 90%, at least 95%, at least 98%, at least 99%, or 100%, amino acid sequence identity to amino acids 728-774 of the S. pyogenes Cas9 amino acid sequence set forth in SEQ ID NO: 1545, or a corresponding segment of a Cas9 polypeptide amino acid sequence set forth in any of SEQ ID NOs: 1-259 and 795-1346; and has a length of 45-50 (e.g., 45, 46, 47, 48, 49, or 50) amino acids.

[0426] An HNH polypeptide can comprise an amino acid sequence having at least 75%, at least 80%, at least 85%, at least 90%, at least 95%, at least 98%, at least 99%, or 100%, amino acid sequence identity to a contiguous stretch of from 100 to 134 amino acids of amino acids 776-909 of the S. pyogenes Cas9 amino acid sequence set forth in SEQ ID NO: 1545, or a corresponding segment of a Cas9 polypeptide amino acid sequence set forth in any of SEQ ID NOs: 1-259 and 795-1346; and can have a length of from 90 amino acids to 150 amino acids, e.g., from 90 amino acids to 95 amino acids, from 95 to amino acids to 100 amino acids, from 100 amino acids to 125 amino acids, from 125 amino acids to 130 amino acids, from 130 amino acids to 135 amino acids, from 135 amino acids to 140 amino acids, from 140 amino acids to 145 amino acids, or from 145 amino acids to 150 amino acids. In some cases, an HNH polypeptide comprises an amino acid sequence having at least 75%, at least 80%, at least 85%, at least 90%, at least 95%, at least 98%, at least 99%, or 100%, amino acid sequence identity to amino acids 776-909 of the S. pyogenes Cas9 amino acid sequence set forth in SEQ ID NO: 1545, or a corresponding segment of a Cas9 polypeptide amino acid sequence set forth in any of SEQ ID NOs: 1-259 and 795-1346; and has a length of from 130 amino acids to 140 amino acids (e.g., 130, 131, 132, 133, 134, 135, 136, 137, 138, 139, or 140 amino acids).

[0427] A RuvCIII polypeptide can comprise an amino acid sequence having at least 75%, at least 80%, at least 85%, at least 90%, at least 95%, at least 98%, at least 99%, or 100%, amino acid sequence identity to a contiguous stretch of from 150 amino acids to 190 amino acids of amino acids 910 to 1099 of the S. pyogenes Cas9 amino acid sequence set forth in SEQ ID NO: 1545, or a corresponding segment of a Cas9 polypeptide amino acid sequence set forth in any of SEQ ID NOs: 1-259 and 795-1346; and can have a length of from 150 amino acids to 160 amino acids, from 160 amino acids to 170 amino acids, from 170 amino acids to 180 amino acids, from 180 amino acids to 190 amino acids, from 190 amino acids to 200 amino acids, from 200 amino acids to 210 amino acids, or from 210 amino acids to 220 amino acids. In some cases, a RuvCIII polypeptide comprises an amino acid sequence having at least 75%, at least 80%, at least 85%, at least 90%, at least 95%, at least 98%, at least 99%, or 100%, amino acid sequence identity to amino acids 910 to 1099 of the S. pyogenes Cas9 amino acid sequence set forth in SEQ ID NO: 1545, or a corresponding segment of a Cas9 polypeptide amino acid sequence set forth in any of SEQ ID NOs: 1-259 and 795-1346; and has a length of from 180 amino acids to 190 amino acids (e.g., 180, 181, 182, 183, 184, 185, 186, 187, 188, 189, or 190 amino acids).

[0428] A PAM-interacting polypeptide can comprise an amino acid sequence having at least 75%, at least 80%, at least 85%, at least 90%, at least 95%, at least 98%, at least 99%, or 100%, amino acid sequence identity to a contiguous stretch of from 200 amino acids to 268 amino acids of amino acids 1100 to 1367 of the S. pyogenes Cas9 amino acid sequence set forth in SEQ ID NO: 1545, or a corresponding segment of a Cas9 polypeptide amino acid sequence set forth in any of SEQ ID NOs: 1-259 and 795-1346; and can have a length of from 240 amino acids to 280 amino acids, e.g., from 240 amino acids to 250 amino acids, from 250 amino acids to 260 amino acids, from 260 amino acids to 270 amino acids, or from 270 amino acids to 280 amino acids. In some cases, a PAM-interacting polypeptide comprises an amino acid sequence having at least 75%, at least 80%, at least 85%, at least 90%, at least 95%, at least 98%, at least 99%, or 100%, amino acid sequence identity to amino acids 1100 to 1367 of the S. pyogenes Cas9 amino acid sequence set forth in SEQ ID NO: 1545, or a corresponding segment of a Cas9 polypeptide amino acid sequence set forth in any of SEQ ID NOs: 1-259 and 795-1346; and has a length of from 260 amino acids to 270 amino acids (e.g., 260, 261, 262, 263, 264, 265, 266, 267, 268, 269, or 270 amino acids).

[0429] A RuvCI polypeptide can comprise an amino acid sequence having at least 75%, at least 80%, at least 85%, at least 90%, at least 95%, at least 98%, at least 99%, or 100%, amino acid sequence identity to a contiguous stretch of from 40 amino acids to 60 amino acids of amino acids 1-60 of the S. pyogenes Cas9 amino acid sequence set forth in SEQ ID NO: 1545, or a corresponding segment of a Cas9 polypeptide amino acid sequence set forth in any of SEQ ID NOs: 1-259 and 795-1346; and can have a length of from 40 amino acids to 80 amino acids, e.g., from 40 amino acids to 50 amino acids, from 50 amino acids to 60 amino acids, from 60 amino acids to 70 amino acids, or from 70 amino acids to 80 amino acids. In some cases, a RuvCI polypeptide comprises an amino acid sequence having at least 75%, at least 80%, at least 85%, at least 90%, at least 95%, at least 98%, at least 99%, or 100%, amino acid sequence identity to amino acids 1-60 of the S. pyogenes Cas9 amino acid sequence set forth in SEQ ID NO: 1545, or a corresponding segment of a Cas9 polypeptide amino acid sequence set forth in any of SEQ ID NOs: 1-259 and 795-1346; and has a length of from 50 amino acids to 60 amino acids (e.g., 50, 51, 52, 53, 54, 55, 56, 57, 58, 59, or 60 amino acids).

[0430] Cas9 Nuclease Lobe Circular Permutant 2

[0431] In some cases, the first fusion polypeptide comprises, in order from N-terminus to C-terminus: a) a first fusion partner; and b) a first polypeptide comprising: i) a C-terminal portion of an HNH polypeptide; ii) a RuvCIII polypeptide; iii) a PAM-interacting polypeptide; v) a RuvCI polypeptide; vi) a RuvCII polypeptide; and vi) an N-terminal portion of an HNH polypeptide. In some cases, the first fusion polypeptide comprises, in order from N-terminus to C-terminus: a) a first polypeptide comprising: i) a C-terminal portion of an HNH polypeptide; ii) a RuvCIII polypeptide; iii) a PAM-interacting polypeptide; v) a RuvCI polypeptide; vi) a RuvCII polypeptide; and vi) an N-terminal portion of an HNH polypeptide; and b) a first fusion partner. In some cases, the first fusion partner is a first member of a dimerization pair. Suitable first members of a dimerization pair are described herein.

[0432] In some cases, the first fusion polypeptide comprises a heterologous sequence that provides for subcellular localization (e.g., a nuclear localization signal (NLS) for targeting to the nucleus; a mitochondrial localization signal for targeting to the mitochondria; a chloroplast localization signal for targeting to a chloroplast; an ER retention signal; and the like). In some cases, the first fusion polypeptide includes 2 or more, 3 or more, 4 or more, or 5 or more NLSs. In some cases, an NLS is located at or near (e.g., within 75 amino acids, 50 amino acids, or 30 amino acids) the N-terminus and/or at or near (e.g., within 75 amino acids, 50 amino acids, or 30 amino acids) the C-terminus. In some cases, the first fusion polypeptide comprises a nuclear localization signal (NLS).

[0433] In some cases, the first fusion polypeptide comprises, in order from N-terminus to C-terminus: a) an NLS; b) a first fusion partner; and c) a first polypeptide comprising: i) a C-terminal portion of an HNH polypeptide; ii) a RuvCIII polypeptide; iii) a PAM-interacting polypeptide; v) a RuvCI polypeptide; vi) a RuvCII polypeptide; and vi) an N-terminal portion of an HNH polypeptide. In some cases, the first fusion polypeptide comprises, in order from N-terminus to C-terminus: a) a first polypeptide comprising: i) a C-terminal portion of an HNH polypeptide; ii) a RuvCIII polypeptide; iii) a PAM-interacting polypeptide; v) a RuvCI polypeptide; vi) a RuvCII polypeptide; and vi) an N-terminal portion of an HNH polypeptide; b) a first fusion partner; and c) an NLS. In some cases, the first fusion polypeptide comprises, in order from N-terminus to C-terminus: a) an NLS; b) a first fusion partner; c) a first polypeptide comprising: i) a C-terminal portion of an HNH polypeptide; ii) a RuvCIII polypeptide; iii) a PAM-interacting polypeptide; v) a RuvCI polypeptide; vi) a RuvCII polypeptide; and vi) an N-terminal portion of an HNH polypeptide; and d) an NLS. In some cases, the NLS comprises the amino acid sequence MAPKKKRKVGIHGVPAA (SEQ ID NO: 1546). In some cases, the NLS comprises the amino acid sequence KRPAATKKAGQAKKKK (SEQ ID NO: 1547). Other suitable NLS are described elsewhere herein. In some cases, the first fusion partner is a first member of a dimerization pair.

[0434] An NLS can be at or near the N-terminus and/or the C-terminus. In some cases, the first fusion polypeptide comprises two or more NLSs (e.g., 3 or more, 4 or more, or 5 or more NLSs). In some cases, the first fusion polypeptide comprises one or more NLSs (e.g., 2 or more, 3 or more, or 4 or more NLSs) at or near the N-terminus and/or one or more NLSs (e.g., 2 or more, 3 or more, or 4 or more NLSs) at or near the C-terminus. The term “at or near” is used here because, as is known in the art, the NLS need not be at the actual terminus of a protein, but can be positioned near (e.g., within 100 amino acids of) an N- and/or C-terminus (e.g., within 80, within 75, within 60, within 55, within 50, within 45, within 40, within 35, or within 30 amino acids of the an N- and/or C-terminus).

[0435] In some cases, a first fusion polypeptide comprises one or more linker polypeptides. For example, a linker polypeptide can be interposed between any of: a) an NLS and a fusion partner; b) a fusion partner and a C-terminal portion of an HNH polypeptide; c) a PAM-interacting polypeptide and a RuvCI polypeptide; and d) an N-terminal portion of an HNH polypeptide and a fusion partner. Suitable linker polypeptides are as described above.

[0436] A C-terminal portion of an HNH polypeptide can comprise an amino acid sequence having at least 75%, at least 80%, at least 85%, at least 90%, at least 95%, at least 98%, at least 99%, or 100%, amino acid sequence identity to a contiguous stretch of from 35 to 42 amino acids of amino acids 868-909 of the S. pyogenes Cas9 amino acid sequence set forth in SEQ ID NO: 1545, or a corresponding segment of a Cas9 polypeptide amino acid sequence set forth in any of SEQ ID NOs: 1-259 and 795-1346; and can have a length of from 35 to 42 amino acids (e.g., 35, 36, 37, 38, 39, 40, 41, or 42 amino acids). A C-terminal portion of an HNH polypeptide can comprise an amino acid sequence having at least 75%, at least 80%, at least 85%, at least 90%, at least 95%, at least 98%, at least 99%, or 100%, amino acid sequence identity to a contiguous stretch of from 50 amino acids to 67 amino acids of amino acids 842-909 of the S. pyogenes Cas9 amino acid sequence set forth in SEQ ID NO: 1545, or a corresponding segment of a Cas9 polypeptide amino acid sequence set forth in any of SEQ ID NOs: 1-259 and 795-1346; and can have a length of from 50 amino acids to 80 amino acids, e.g., from 50 amino acids to 60 amino acids, from 60 amino acids to 70 amino acids, or from 70 amino acids to 80 amino acids.

[0437] An N-terminal portion of an HNH polypeptide can comprise an amino acid sequence having at least 75%, at least 80%, at least 85%, at least 90%, at least 95%, at least 98%, at least 99%, or 100%, amino acid sequence identity to a contiguous stretch of from 80 amino acids to 92 amino acids of amino acids 776 to 867 of the S. pyogenes Cas9 amino acid sequence set forth in SEQ ID NO: 1545, or a corresponding segment of a Cas9 polypeptide amino acid sequence set forth in any of SEQ ID NOs: 1-259 and 795-1346; and can have a length of from 80 amino acids to 110 amino acids, e.g., from 80 amino acids to 90 amino acids, from 90 amino acids to 100 amino acids, or from 100 amino acids to 110 amino acids. In some cases, an N-terminal portion of an HNH polypeptide comprises an amino acid sequence having at least 75%, at least 80%, at least 85%, at least 90%, at least 95%, at least 98%, at least 99%, or 100%, amino acid sequence identity to amino acids 776 to 867 of the S. pyogenes Cas9 amino acid sequence set forth in SEQ ID NO: 1545, or a corresponding segment of a Cas9 polypeptide amino acid sequence set forth in any of SEQ ID NOs: 1-259 and 795-1346; and has a length of 85 amino acids to 95 amino acids (85, 86, 87, 88, 89, 90, 91, 92, 93, 94, or 95 amino acids). An N-terminal portion of an HNH polypeptide can comprise an amino acid sequence having at least 75%, at least 80%, at least 85%, at least 90%, at least 95%, at least 98%, at least 99%, or 100%, amino acid sequence identity to a contiguous stretch of from 50 amino acids to 66 amino acids of amino acids 776-841 of the S. pyogenes Cas9 amino acid sequence set forth in SEQ ID NO: 1545, or a corresponding segment of a Cas9 polypeptide amino acid sequence set forth in any of SEQ ID NOs: 1-259 and 795-1346; and can have a length of from 50 amino acids to 80 amino acids, e.g., from 50 amino acids to 60 amino acids, from 60 amino acids to 70 amino acids, or from 70 amino acids to 80 amino acids.

[0438] A RuvCIII polypeptide can comprise an amino acid sequence having at least 75%, at least 80%, at least 85%, at least 90%, at least 95%, at least 98%, at least 99%, or 100%, amino acid sequence identity to a contiguous stretch of from 150 amino acids to 190 amino acids of amino acids 910 to 1099 of the S. pyogenes Cas9 amino acid sequence set forth in SEQ ID NO: 1545, or a corresponding segment of a Cas9 polypeptide amino acid sequence set forth in any of SEQ ID NOs: 1-259 and 795-1346; and can have a length of from 150 amino acids to 160 amino acids, from 160 amino acids to 170 amino acids, from 170 amino acids to 180 amino acids, from 180 amino acids to 190 amino acids, from 190 amino acids to 200 amino acids, from 200 amino acids to 210 amino acids, or from 210 amino acids to 220 amino acids. In some cases, a RuvCIII polypeptide comprises an amino acid sequence having at least 75%, at least 80%, at least 85%, at least 90%, at least 95%, at least 98%, at least 99%, or 100%, amino acid sequence identity to amino acids 910 to 1099 of the S. pyogenes Cas9 amino acid sequence set forth in SEQ ID NO: 1545, or a corresponding segment of a Cas9 polypeptide amino acid sequence set forth in any of SEQ ID NOs: 1-259 and 795-1346; and has a length of from 180 amino acids to 190 amino acids (e.g., 180, 181, 182, 183, 184, 185, 186, 187, 188, 189, or 190 amino acids).

[0439] A PAM-interacting polypeptide can comprise an amino acid sequence having at least 75%, at least 80%, at least 85%, at least 90%, at least 95%, at least 98%, at least 99%, or 100%, amino acid sequence identity to a contiguous stretch of from 200 amino acids to 268 amino acids of amino acids 1100 to 1367 of the S. pyogenes Cas9 amino acid sequence set forth in SEQ ID NO: 1545, or a corresponding segment of a Cas9 polypeptide amino acid sequence set forth in any of SEQ ID NOs: 1-259 and 795-1346; and can have a length of from 240 amino acids to 280 amino acids, e.g., from 240 amino acids to 250 amino acids, from 250 amino acids to 260 amino acids, from 260 amino acids to 270 amino acids, or from 270 amino acids to 280 amino acids. In some cases, a PAM-interacting polypeptide comprises an amino acid sequence having at least 75%, at least 80%, at least 85%, at least 90%, at least 95%, at least 98%, at least 99%, or 100%, amino acid sequence identity to amino acids 1100 to 1367 of the S. pyogenes Cas9 amino acid sequence set forth in SEQ ID NO: 1545, or a corresponding segment of a Cas9 polypeptide amino acid sequence set forth in any of SEQ ID NOs: 1-259 and 795-1346; and has a length of from 260 amino acids to 270 amino acids (e.g., 260, 261, 262, 263, 264, 265, 266, 267, 268, 269, or 270 amino acids).

[0440] A RuvCI polypeptide can comprise an amino acid sequence having at least 75%, at least 80%, at least 85%, at least 90%, at least 95%, at least 98%, at least 99%, or 100%, amino acid sequence identity to a contiguous stretch of from 40 amino acids to 60 amino acids of amino acids 1-60 of the S. pyogenes Cas9 amino acid sequence set forth in SEQ ID NO: 1545, or a corresponding segment of a Cas9 polypeptide amino acid sequence set forth in any of SEQ ID NOs: 1-259 and 795-1346; and can have a length of from 40 amino acids to 80 amino acids, e.g., from 40 amino acids to 50 amino acids, from 50 amino acids to 60 amino acids, from 60 amino acids to 70 amino acids, or from 70 amino acids to 80 amino acids. In some cases, a RuvCI polypeptide comprises an amino acid sequence having at least 75%, at least 80%, at least 85%, at least 90%, at least 95%, at least 98%, at least 99%, or 100%, amino acid sequence identity to amino acids 1-60 of the S. pyogenes Cas9 amino acid sequence set forth in SEQ ID NO: 1545, or a corresponding segment of a Cas9 polypeptide amino acid sequence set forth in any of SEQ ID NOs: 1-259 and 795-1346; and has a length of from 50 amino acids to 60 amino acids (e.g., 50, 51, 52, 53, 54, 55, 56, 57, 58, 59, or 60 amino acids).

[0441] A RuvCII polypeptide can comprise an amino acid sequence having at least 75%, at least 80%, at least 85%, at least 90%, at least 95%, at least 98%, at least 99%, or 100%, amino acid sequence identity to a contiguous stretch of from 40 to 46 amino acids of amino acids 729-775 of the S. pyogenes Cas9 amino acid sequence set forth in SEQ ID NO: 1545, or a corresponding segment of a Cas9 polypeptide amino acid sequence set forth in any of SEQ ID NOs: 1-259 and 795-1346; and can have a length of from 40 amino acids to about 60 amino acids, e.g., from 40 amino acids to 45 amino acids, from 45 amino acids to 50 amino acids, from 50 amino acids to 55 amino acids, or from 55 amino acids to 60 amino acids. In some cases, a RuvCII polypeptide comprises an amino acid sequence having at least 75%, at least 80%, at least 85%, at least 90%, at least 95%, at least 98%, at least 99%, or 100%, amino acid sequence identity to amino acids 728-774 of the S. pyogenes Cas9 amino acid sequence set forth in SEQ ID NO: 1545, or a corresponding segment of a Cas9 polypeptide amino acid sequence set forth in any of SEQ ID NOs: 1-259 and 795-1346; and has a length of 45-50 (e.g., 45, 46, 47, 48, 49, or 50) amino acids.

[0442] Cas9 Nuclease Lobe Circular Permutant 3

[0443] In some cases, the first fusion polypeptide comprises, in order from N-terminus to C-terminus: a) a first fusion partner; and b) a first polypeptide comprising: i) an HNH polypeptide; ii) a RuvCIII polypeptide; iii) a PAM-interacting polypeptide; iv) a RuvCI polypeptide; and vi) a RuvCII polypeptide. In some cases, the first fusion polypeptide comprises, in order from N-terminus to C-terminus: a) a first polypeptide comprising: i) an HNH polypeptide; ii) a RuvCIII polypeptide; iii) a PAM-interacting polypeptide; iv) a RuvCI polypeptide; and vi) a RuvCII polypeptide; and b) a first fusion partner. In some cases, the first fusion partner is a first member of a dimerization pair. Suitable first members of a dimerization pair are described herein.

[0444] In some cases, the first fusion polypeptide comprises a heterologous sequence that provides for subcellular localization (e.g., a nuclear localization signal (NLS) for targeting to the nucleus; a mitochondrial localization signal for targeting to the mitochondria; a chloroplast localization signal for targeting to a chloroplast; an ER retention signal; and the like). In some cases, the first fusion polypeptide includes 2 or more, 3 or more, 4 or more, or 5 or more NLSs. In some cases, an NLS is located at or near (e.g., within 75 amino acids, 50 amino acids, or 30 amino acids) the N-terminus and/or at or near (e.g., within 75 amino acids, 50 amino acids, or 30 amino acids) the C-terminus. In some cases, the first fusion polypeptide comprises a nuclear localization signal (NLS).

[0445] In some cases, the first fusion polypeptide comprises, in order from N-terminus to C-terminus: a) an NLS; b) a first fusion partner; and c) a first polypeptide comprising: i) an HNH polypeptide; ii) a RuvCIII polypeptide; iii) a PAM-interacting polypeptide; iv) a RuvCI polypeptide; and vi) a RuvCII polypeptide. In some cases, the first fusion polypeptide comprises, in order from N-terminus to C-terminus: a) a first polypeptide comprising: i) an HNH polypeptide; ii) a RuvCIII polypeptide; iii) a PAM-interacting polypeptide; iv) a RuvCI polypeptide; and vi) a RuvCII polypeptide; b) a first fusion partner; and c) an NLS. In some cases, the first fusion polypeptide comprises, in order from N-terminus to C-terminus: a) an NLS; b) a first fusion partner; c) a first polypeptide comprising: i) an HNH polypeptide; ii) a RuvCIII polypeptide; iii) a PAM-interacting polypeptide; iv) a RuvCI polypeptide; and vi) a RuvCII polypeptide; and d) an NLS. In some cases, the NLS comprises the amino acid sequence MAPKKKRKVGIHGVPAA (SEQ ID NO: 1546). In some cases, the NLS comprises the amino acid sequence KRPAATKKAGQAKKKK (SEQ ID NO: 1547). Other suitable NLS are described elsewhere herein. In some cases, the first fusion partner is a first member of a dimerization pair.

[0446] An NLS can be at or near the N-terminus and/or the C-terminus. In some cases, the first fusion polypeptide comprises two or more NLSs (e.g., 3 or more, 4 or more, or 5 or more NLSs). In some cases, the first fusion polypeptide comprises one or more NLSs (e.g., 2 or more, 3 or more, or 4 or more NLSs) at or near the N-terminus and/or one or more NLSs (e.g., 2 or more, 3 or more, or 4 or more NLSs) at or near the C-terminus. The term “at or near” is used here because, as is known in the art, the NLS need not be at the actual terminus of a protein, but can be positioned near (e.g., within 100 amino acids of) an N- and/or C-terminus (e.g., within 80, within 75, within 60, within 55, within 50, within 45, within 40, within 35, or within 30 amino acids of the an N- and/or C-terminus).

[0447] In some cases, a first fusion polypeptide comprises one or more linker polypeptides. For example, a linker polypeptide can be interposed between any of: a) an NLS and a fusion partner; b) a fusion partner and an HNH polypeptide; c) a PAM-interacting polypeptide and a RuvCI polypeptide; and d) a RuvCII polypeptide and a fusion partner. Suitable linker polypeptides are as described above.

[0448] A RuvCIII polypeptide can comprise an amino acid sequence having at least 75%, at least 80%, at least 85%, at least 90%, at least 95%, at least 98%, at least 99%, or 100%, amino acid sequence identity to a contiguous stretch of from 150 amino acids to 190 amino acids of amino acids 910 to 1099 of the S. pyogenes Cas9 amino acid sequence set forth in SEQ ID NO: 1545, or a corresponding segment of a Cas9 polypeptide amino acid sequence set forth in any of SEQ ID NOs: 1-259 and 795-1346; and can have a length of from 150 amino acids to 160 amino acids, from 160 amino acids to 170 amino acids, from 170 amino acids to 180 amino acids, from 180 amino acids to 190 amino acids, from 190 amino acids to 200 amino acids, from 200 amino acids to 210 amino acids, or from 210 amino acids to 220 amino acids. In some cases, a RuvCIII polypeptide comprises an amino acid sequence having at least 75%, at least 80%, at least 85%, at least 90%, at least 95%, at least 98%, at least 99%, or 100%, amino acid sequence identity to amino acids 910 to 1099 of the S. pyogenes Cas9 amino acid sequence set forth in SEQ ID NO: 1545, or a corresponding segment of a Cas9 polypeptide amino acid sequence set forth in any of SEQ ID NOs: 1-259 and 795-1346; and has a length of from 180 amino acids to 190 amino acids (e.g., 180, 181, 182, 183, 184, 185, 186, 187, 188, 189, or 190 amino acids).

[0449] A PAM-interacting polypeptide can comprise an amino acid sequence having at least 75%, at least 80%, at least 85%, at least 90%, at least 95%, at least 98%, at least 99%, or 100%, amino acid sequence identity to a contiguous stretch of from 200 amino acids to 268 amino acids of amino acids 1100 to 1367 of the S. pyogenes Cas9 amino acid sequence set forth in SEQ ID NO: 1545, or a corresponding segment of a Cas9 polypeptide amino acid sequence set forth in any of SEQ ID NOs: 1-259 and 795-1346; and can have a length of from 240 amino acids to 280 amino acids, e.g., from 240 amino acids to 250 amino acids, from 250 amino acids to 260 amino acids, from 260 amino acids to 270 amino acids, or from 270 amino acids to 280 amino acids. In some cases, a PAM-interacting polypeptide comprises an amino acid sequence having at least 75%, at least 80%, at least 85%, at least 90%, at least 95%, at least 98%, at least 99%, or 100%, amino acid sequence identity to amino acids 1100 to 1367 of the S. pyogenes Cas9 amino acid sequence set forth in SEQ ID NO: 1545, or a corresponding segment of a Cas9 polypeptide amino acid sequence set forth in any of SEQ ID NOs: 1-259 and 795-1346; and has a length of from 260 amino acids to 270 amino acids (e.g., 260, 261, 262, 263, 264, 265, 266, 267, 268, 269, or 270 amino acids).

[0450] A RuvCI polypeptide can comprise an amino acid sequence having at least 75%, at least 80%, at least 85%, at least 90%, at least 95%, at least 98%, at least 99%, or 100%, amino acid sequence identity to a contiguous stretch of from 40 amino acids to 60 amino acids of amino acids 1-60 of the S. pyogenes Cas9 amino acid sequence set forth in SEQ ID NO: 1545, or a corresponding segment of a Cas9 polypeptide amino acid sequence set forth in any of SEQ ID NOs: 1-259 and 795-1346; and can have a length of from 40 amino acids to 80 amino acids, e.g., from 40 amino acids to 50 amino acids, from 50 amino acids to 60 amino acids, from 60 amino acids to 70 amino acids, or from 70 amino acids to 80 amino acids. In some cases, a RuvCI polypeptide comprises an amino acid sequence having at least 75%, at least 80%, at least 85%, at least 90%, at least 95%, at least 98%, at least 99%, or 100%, amino acid sequence identity to amino acids 1-60 of the S. pyogenes Cas9 amino acid sequence set forth in SEQ ID NO: 1545, or a corresponding segment of a Cas9 polypeptide amino acid sequence set forth in any of SEQ ID NOs: 1-259 and 795-1346; and has a length of from 50 amino acids to 60 amino acids (e.g., 50, 51, 52, 53, 54, 55, 56, 57, 58, 59, or 60 amino acids).

[0451] A RuvCII polypeptide can comprise an amino acid sequence having at least 75%, at least 80%, at least 85%, at least 90%, at least 95%, at least 98%, at least 99%, or 100%, amino acid sequence identity to a contiguous stretch of from 40 to 46 amino acids of amino acids 729-775 of the S. pyogenes Cas9 amino acid sequence set forth in SEQ ID NO: 1545, or a corresponding segment of a Cas9 polypeptide amino acid sequence set forth in any of SEQ ID NOs: 1-259 and 795-1346; and can have a length of from 40 amino acids to about 60 amino acids, e.g., from 40 amino acids to 45 amino acids, from 45 amino acids to 50 amino acids, from 50 amino acids to 55 amino acids, or from 55 amino acids to 60 amino acids. In some cases, a RuvCII polypeptide comprises an amino acid sequence having at least 75%, at least 80%, at least 85%, at least 90%, at least 95%, at least 98%, at least 99%, or 100%, amino acid sequence identity to amino acids 728-774 of the S. pyogenes Cas9 amino acid sequence set forth in SEQ ID NO: 1545, or a corresponding segment of a Cas9 polypeptide amino acid sequence set forth in any of SEQ ID NOs: 1-259 and 795-1346; and has a length of 45-50 (e.g., 45, 46, 47, 48, 49, or 50) amino acids.

[0452] An HNH polypeptide can comprise an amino acid sequence having at least 75%, at least 80%, at least 85%, at least 90%, at least 95%, at least 98%, at least 99%, or 100%, amino acid sequence identity to a contiguous stretch of from 100 to 134 amino acids of amino acids 776-909 of the S. pyogenes Cas9 amino acid sequence set forth in SEQ ID NO: 1545, or a corresponding segment of a Cas9 polypeptide amino acid sequence set forth in any of SEQ ID NOs: 1-259 and 795-1346; and can have a length of from 90 amino acids to 150 amino acids, e.g., from 90 amino acids to 95 amino acids, from 95 to amino acids to 100 amino acids, from 100 amino acids to 125 amino acids, from 125 amino acids to 130 amino acids, from 130 amino acids to 135 amino acids, from 135 amino acids to 140 amino acids, from 140 amino acids to 145 amino acids, or from 145 amino acids to 150 amino acids. In some cases, an HNH polypeptide comprises an amino acid sequence having at least 75%, at least 80%, at least 85%, at least 90%, at least 95%, at least 98%, at least 99%, or 100%, amino acid sequence identity to amino acids 776-909 of the S. pyogenes Cas9 amino acid sequence set forth in SEQ ID NO: 1545, or a corresponding segment of a Cas9 polypeptide amino acid sequence set forth in any of SEQ ID NOs: 1-259 and 795-1346; and has a length of from 130 amino acids to 140 amino acids (e.g., 130, 131, 132, 133, 134, 135, 136, 137, 138, 139, or 140 amino acids).

[0453] Cas9 Nuclease Lobe Circular Permutant 4

[0454] In some cases, the first fusion polypeptide comprises, in order from N-terminus to C-terminus: a) a first fusion partner; and b) a first polypeptide comprising: i) a RuvCIII polypeptide; ii) a PAM-interacting polypeptide; iii) a RuvCI polypeptide; iv) a RuvCII polypeptide; and v) an HNH polypeptide. In some cases, the first fusion polypeptide comprises, in order from N-terminus to C-terminus: a) a first polypeptide comprising: i) a RuvCIII polypeptide; ii) a PAM-interacting polypeptide; iii) a RuvCI polypeptide; iv) a RuvCII polypeptide; and v) an HNH polypeptide; and b) a first fusion partner. In some cases, the first fusion partner is a first member of a dimerization pair. Suitable first members of a dimerization pair are described herein.

[0455] In some cases, the first fusion polypeptide comprises a heterologous sequence that provides for subcellular localization (e.g., a nuclear localization signal (NLS) for targeting to the nucleus; a mitochondrial localization signal for targeting to the mitochondria; a chloroplast localization signal for targeting to a chloroplast; an ER retention signal; and the like). In some cases, the first fusion polypeptide includes 2 or more, 3 or more, 4 or more, or 5 or more NLSs. In some cases, an NLS is located at or near (e.g., within 75 amino acids, 50 amino acids, or 30 amino acids) the N-terminus and/or at or near (e.g., within 75 amino acids, 50 amino acids, or 30 amino acids) the C-terminus. In some cases, the first fusion polypeptide comprises a nuclear localization signal (NLS).

[0456] In some cases, the first fusion polypeptide comprises, in order from N-terminus to C-terminus: a) an NLS; b) a first fusion partner; and c) a first polypeptide comprising: i) a RuvCIII polypeptide; ii) a PAM-interacting polypeptide; iii) a RuvCI polypeptide; iv) a RuvCII polypeptide; and v) an HNH polypeptide. In some cases, the first fusion polypeptide comprises, in order from N-terminus to C-terminus: a) a first polypeptide comprising: i) a RuvCIII polypeptide; ii) a PAM-interacting polypeptide; iii) a RuvCI polypeptide; iv) a RuvCII polypeptide; and v) an HNH polypeptide; b) a first fusion partner; and c) a fusion partner. In some cases, the first fusion polypeptide comprises, in order from N-terminus to C-terminus: a) an NLS; b) a first fusion partner; c) a first polypeptide comprising: i) a RuvCIII polypeptide; ii) a PAM-interacting polypeptide; iii) a RuvCI polypeptide; iv) a RuvCII polypeptide; and v) an HNH polypeptide; d) an NLS. In some cases, the first fusion partner is a first member of a dimerization pair. In some cases, the NLS comprises the amino acid sequence MAPKKKRKVGIHGVPAA (SEQ ID NO: 1546). In some cases, the NLS comprises the amino acid sequence KRPAATKKAGQAKKKK (SEQ ID NO: 1547). Other suitable NLS are described elsewhere herein. In some cases, the first fusion partner is a first member of a dimerization pair.

[0457] An NLS can be at or near the N-terminus and/or the C-terminus. In some cases, the first fusion polypeptide comprises two or more NLSs (e.g., 3 or more, 4 or more, or 5 or more NLSs). In some cases, the first fusion polypeptide comprises one or more NLSs (e.g., 2 or more, 3 or more, or 4 or more NLSs) at or near the N-terminus and/or one or more NLSs (e.g., 2 or more, 3 or more, or 4 or more NLSs) at or near the C-terminus. The term “at or near” is used here because, as is known in the art, the NLS need not be at the actual terminus of a protein, but can be positioned near (e.g., within 100 amino acids of) an N- and/or C-terminus (e.g., within 80, within 75, within 60, within 55, within 50, within 45, within 40, within 35, or within 30 amino acids of the an N- and/or C-terminus).

[0458] In some cases, a first fusion polypeptide comprises one or more linker polypeptides. For example, a linker polypeptide can be interposed between any of: a) an NLS and a fusion partner; b) a fusion partner and a RuvCIII polypeptide; c) a PAM-interacting polypeptide and a RuvCI polypeptide; and d) an HNH polypeptide and a fusion partner. Suitable linker polypeptides are as described above.

[0459] A RuvCIII polypeptide can comprise an amino acid sequence having at least 75%, at least 80%, at least 85%, at least 90%, at least 95%, at least 98%, at least 99%, or 100%, amino acid sequence identity to a contiguous stretch of from 150 amino acids to 190 amino acids of amino acids 910 to 1099 of the S. pyogenes Cas9 amino acid sequence set forth in SEQ ID NO: 1545, or a corresponding segment of a Cas9 polypeptide amino acid sequence set forth in any of SEQ ID NOs: 1-259 and 795-1346; and can have a length of from 150 amino acids to 160 amino acids, from 160 amino acids to 170 amino acids, from 170 amino acids to 180 amino acids, from 180 amino acids to 190 amino acids, from 190 amino acids to 200 amino acids, from 200 amino acids to 210 amino acids, or from 210 amino acids to 220 amino acids. In some cases, a RuvCIII polypeptide comprises an amino acid sequence having at least 75%, at least 80%, at least 85%, at least 90%, at least 95%, at least 98%, at least 99%, or 100%, amino acid sequence identity to amino acids 910 to 1099 of the S. pyogenes Cas9 amino acid sequence set forth in SEQ ID NO: 1545, or a corresponding segment of a Cas9 polypeptide amino acid sequence set forth in any of SEQ ID NOs: 1-259 and 795-1346; and has a length of from 180 amino acids to 190 amino acids (e.g., 180, 181, 182, 183, 184, 185, 186, 187, 188, 189, or 190 amino acids).

[0460] A PAM-interacting polypeptide can comprise an amino acid sequence having at least 75%, at least 80%, at least 85%, at least 90%, at least 95%, at least 98%, at least 99%, or 100%, amino acid sequence identity to a contiguous stretch of from 200 amino acids to 268 amino acids of amino acids 1100 to 1367 of the S. pyogenes Cas9 amino acid sequence set forth in SEQ ID NO: 1545, or a corresponding segment of a Cas9 polypeptide amino acid sequence set forth in any of SEQ ID NOs: 1-259 and 795-1346; and can have a length of from 240 amino acids to 280 amino acids, e.g., from 240 amino acids to 250 amino acids, from 250 amino acids to 260 amino acids, from 260 amino acids to 270 amino acids, or from 270 amino acids to 280 amino acids. In some cases, a PAM-interacting polypeptide comprises an amino acid sequence having at least 75%, at least 80%, at least 85%, at least 90%, at least 95%, at least 98%, at least 99%, or 100%, amino acid sequence identity to amino acids 1100 to 1367 of the S. pyogenes Cas9 amino acid sequence set forth in SEQ ID NO: 1545, or a corresponding segment of a Cas9 polypeptide amino acid sequence set forth in any of SEQ ID NOs: 1-259 and 795-1346; and has a length of from 260 amino acids to 270 amino acids (e.g., 260, 261, 262, 263, 264, 265, 266, 267, 268, 269, or 270 amino acids).

[0461] A RuvCI polypeptide can comprise an amino acid sequence having at least 75%, at least 80%, at least 85%, at least 90%, at least 95%, at least 98%, at least 99%, or 100%, amino acid sequence identity to a contiguous stretch of from 40 amino acids to 60 amino acids of amino acids 1-60 of the S. pyogenes Cas9 amino acid sequence set forth in SEQ ID NO: 1545, or a corresponding segment of a Cas9 polypeptide amino acid sequence set forth in any of SEQ ID NOs: 1-259 and 795-1346; and can have a length of from 40 amino acids to 80 amino acids, e.g., from 40 amino acids to 50 amino acids, from 50 amino acids to 60 amino acids, from 60 amino acids to 70 amino acids, or from 70 amino acids to 80 amino acids. In some cases, a RuvCI polypeptide comprises an amino acid sequence having at least 75%, at least 80%, at least 85%, at least 90%, at least 95%, at least 98%, at least 99%, or 100%, amino acid sequence identity to amino acids 1-60 of the S. pyogenes Cas9 amino acid sequence set forth in SEQ ID NO: 1545, or a corresponding segment of a Cas9 polypeptide amino acid sequence set forth in any of SEQ ID NOs: 1-259 and 795-1346; and has a length of from 50 amino acids to 60 amino acids (e.g., 50, 51, 52, 53, 54, 55, 56, 57, 58, 59, or 60 amino acids).

[0462] A RuvCII polypeptide can comprise an amino acid sequence having at least 75%, at least 80%, at least 85%, at least 90%, at least 95%, at least 98%, at least 99%, or 100%, amino acid sequence identity to a contiguous stretch of from 40 to 46 amino acids of amino acids 729-775 of the S. pyogenes Cas9 amino acid sequence set forth in SEQ ID NO: 1545, or a corresponding segment of a Cas9 polypeptide amino acid sequence set forth in any of SEQ ID NOs: 1-259 and 795-1346; and can have a length of from 40 amino acids to about 60 amino acids, e.g., from 40 amino acids to 45 amino acids, from 45 amino acids to 50 amino acids, from 50 amino acids to 55 amino acids, or from 55 amino acids to 60 amino acids. In some cases, a RuvCII polypeptide comprises an amino acid sequence having at least 75%, at least 80%, at least 85%, at least 90%, at least 95%, at least 98%, at least 99%, or 100%, amino acid sequence identity to amino acids 728-774 of the S. pyogenes Cas9 amino acid sequence set forth in SEQ ID NO: 1545, or a corresponding segment of a Cas9 polypeptide amino acid sequence set forth in any of SEQ ID NOs: 1-259 and 795-1346; and has a length of 45-50 (e.g., 45, 46, 47, 48, 49, or 50) amino acids.

[0463] An HNH polypeptide can comprise an amino acid sequence having at least 75%, at least 80%, at least 85%, at least 90%, at least 95%, at least 98%, at least 99%, or 100%, amino acid sequence identity to a contiguous stretch of from 100 to 134 amino acids of amino acids 776-909 of the S. pyogenes Cas9 amino acid sequence set forth in SEQ ID NO: 1545, or a corresponding segment of a Cas9 polypeptide amino acid sequence set forth in any of SEQ ID NOs: 1-259 and 795-1346; and can have a length of from 90 amino acids to 150 amino acids, e.g., from 90 amino acids to 95 amino acids, from 95 to amino acids to 100 amino acids, from 100 amino acids to 125 amino acids, from 125 amino acids to 130 amino acids, from 130 amino acids to 135 amino acids, from 135 amino acids to 140 amino acids, from 140 amino acids to 145 amino acids, or from 145 amino acids to 150 amino acids. In some cases, an HNH polypeptide comprises an amino acid sequence having at least 75%, at least 80%, at least 85%, at least 90%, at least 95%, at least 98%, at least 99%, or 100%, amino acid sequence identity to amino acids 776-909 of the S. pyogenes Cas9 amino acid sequence set forth in SEQ ID NO: 1545, or a corresponding segment of a Cas9 polypeptide amino acid sequence set forth in any of SEQ ID NOs: 1-259 and 795-1346; and has a length of from 130 amino acids to 140 amino acids (e.g., 130, 131, 132, 133, 134, 135, 136, 137, 138, 139, or 140 amino acids).

[0464] Cas9 Nuclease Lobe Circular Permutant 5

[0465] In some cases, the first fusion polypeptide comprises, in order from N-terminus to C-terminus: a) a first fusion partner; and b) a first polypeptide comprising: i) a C-terminal portion of a RuvCIII polypeptide; ii) a PAM-interacting polypeptide; iii) a RuvCI polypeptide; iv) a RuvCII polypeptide; v) an HNH polypeptide; and vi) an N-terminal portion of a RuvCIII polypeptide. In some cases, the first fusion polypeptide comprises, in order from N-terminus to C-terminus: a) a first polypeptide comprising: i) a C-terminal portion of a RuvCIII polypeptide; ii) a PAM-interacting polypeptide; iii) a RuvCI polypeptide; iv) a RuvCII polypeptide; v) an HNH polypeptide; and vi) an N-terminal portion of a RuvCIII polypeptide; and b) a first fusion partner. In some cases, the first fusion partner is a first member of a dimerization pair. Suitable first members of a dimerization pair are described elsewhere herein.

[0466] A C-terminal portion of a RuvCIII polypeptide can comprise an amino acid sequence having at least 75%, at least 80%, at least 85%, at least 90%, at least 95%, at least 98%, at least 99%, or 100%, amino acid sequence identity to a contiguous stretch of from 75 amino acids to 84 amino acids of amino acids 1016 to 1099 of the S. pyogenes Cas9 amino acid sequence set forth in SEQ ID NO: 1545, or a corresponding segment of a Cas9 polypeptide amino acid sequence set forth in any of SEQ ID NOs: 1-259 and 795-1346; and can have a length of from 70 amino acids to 100 amino acids, from 70 amino acids to 80 amino acids, from 80 amino acids to 90 amino acids, or from 90 amino acids to 100 amino acids. In some cases, a C-terminal RuvCIII polypeptide comprises an amino acid sequence having at least 75%, at least 80%, at least 85%, at least 90%, at least 95%, at least 98%, at least 99%, or 100%, amino acid sequence identity to amino acids 1016 to 1099 of the S. pyogenes Cas9 amino acid sequence set forth in SEQ ID NO: 1545, or a corresponding segment of a Cas9 polypeptide amino acid sequence set forth in any of SEQ ID NOs: 1-259 and 795-1346; and has a length of from 80 amino acids to 90 amino acids (e.g., 80, 81, 82, 83, 84, 85, 86, 87, 88, 89, or 90 amino acids).

[0467] An N-terminal portion of a RuvCIII polypeptide can comprise an amino acid sequence having at least 75%, at least 80%, at least 85%, at least 90%, at least 95%, at least 98%, at least 99%, or 100%, amino acid sequence identity to a contiguous stretch of from 80 amino acids to 106 amino acids of amino acids 910 to 1015 of the S. pyogenes Cas9 amino acid sequence set forth in SEQ ID NO: 1545, or a corresponding segment of a Cas9 polypeptide amino acid sequence set forth in any of SEQ ID NOs: 1-259 and 795-1346; and can have a length of from 80 amino acids to 120 amino acids, from 80 amino acids to 90 amino acids, from 90 amino acids to 100 amino acids, from 100 amino acids to 110 amino acids,or from 110 amino acids to 120 amino acids. In some cases, a RuvCIII polypeptide comprises an amino acid sequence having at least 75%, at least 80%, at least 85%, at least 90%, at least 95%, at least 98%, at least 99%, or 100%, amino acid sequence identity to amino acids 910 to 1015 of the S. pyogenes Cas9 amino acid sequence set forth in SEQ ID NO: 1545, or a corresponding segment of a Cas9 polypeptide amino acid sequence set forth in any of SEQ ID NOs: 1-259 and 795-1346; and has a length of from 100 amino acids to 106 amino acids (e.g., 100, 101, 102, 103, 104, 105, 106, 107, 108, 109, or 110 amino acids).

[0468] A PAM-interacting polypeptide can comprise an amino acid sequence having at least 75%, at least 80%, at least 85%, at least 90%, at least 95%, at least 98%, at least 99%, or 100%, amino acid sequence identity to a contiguous stretch of from 200 amino acids to 268 amino acids of amino acids 1100 to 1367 of the S. pyogenes Cas9 amino acid sequence set forth in SEQ ID NO: 1545, or a corresponding segment of a Cas9 polypeptide amino acid sequence set forth in any of SEQ ID NOs: 1-259 and 795-1346; and can have a length of from 240 amino acids to 280 amino acids, e.g., from 240 amino acids to 250 amino acids, from 250 amino acids to 260 amino acids, from 260 amino acids to 270 amino acids, or from 270 amino acids to 280 amino acids. In some cases, a PAM-interacting polypeptide comprises an amino acid sequence having at least 75%, at least 80%, at least 85%, at least 90%, at least 95%, at least 98%, at least 99%, or 100%, amino acid sequence identity to amino acids 1100 to 1367 of the S. pyogenes Cas9 amino acid sequence set forth in SEQ ID NO: 1545, or a corresponding segment of a Cas9 polypeptide amino acid sequence set forth in any of SEQ ID NOs: 1-259 and 795-1346; and has a length of from 260 amino acids to 270 amino acids (e.g., 260, 261, 262, 263, 264, 265, 266, 267, 268, 269, or 270 amino acids).

[0469] A RuvCI polypeptide can comprise an amino acid sequence having at least 75%, at least 80%, at least 85%, at least 90%, at least 95%, at least 98%, at least 99%, or 100%, amino acid sequence identity to a contiguous stretch of from 40 amino acids to 60 amino acids of amino acids 1-60 of the S. pyogenes Cas9 amino acid sequence set forth in SEQ ID NO: 1545, or a corresponding segment of a Cas9 polypeptide amino acid sequence set forth in any of SEQ ID NOs: 1-259 and 795-1346; and can have a length of from 40 amino acids to 80 amino acids, e.g., from 40 amino acids to 50 amino acids, from 50 amino acids to 60 amino acids, from 60 amino acids to 70 amino acids, or from 70 amino acids to 80 amino acids. In some cases, a RuvCI polypeptide comprises an amino acid sequence having at least 75%, at least 80%, at least 85%, at least 90%, at least 95%, at least 98%, at least 99%, or 100%, amino acid sequence identity to amino acids 1-60 of the S. pyogenes Cas9 amino acid sequence set forth in SEQ ID NO: 1545, or a corresponding segment of a Cas9 polypeptide amino acid sequence set forth in any of SEQ ID NOs: 1-259 and 795-1346; and has a length of from 50 amino acids to 60 amino acids (e.g., 50, 51, 52, 53, 54, 55, 56, 57, 58, 59, or 60 amino acids).

[0470] A RuvCII polypeptide can comprise an amino acid sequence having at least 75%, at least 80%, at least 85%, at least 90%, at least 95%, at least 98%, at least 99%, or 100%, amino acid sequence identity to a contiguous stretch of from 40 to 46 amino acids of amino acids 729-775 of the S. pyogenes Cas9 amino acid sequence set forth in SEQ ID NO: 1545, or a corresponding segment of a Cas9 polypeptide amino acid sequence set forth in any of SEQ ID NOs: 1-259 and 795-1346; and can have a length of from 40 amino acids to about 60 amino acids, e.g., from 40 amino acids to 45 amino acids, from 45 amino acids to 50 amino acids, from 50 amino acids to 55 amino acids, or from 55 amino acids to 60 amino acids. In some cases, a RuvCII polypeptide comprises an amino acid sequence having at least 75%, at least 80%, at least 85%, at least 90%, at least 95%, at least 98%, at least 99%, or 100%, amino acid sequence identity to amino acids 728-774 of the S. pyogenes Cas9 amino acid sequence set forth in SEQ ID NO: 1545, or a corresponding segment of a Cas9 polypeptide amino acid sequence set forth in any of SEQ ID NOs: 1-259 and 795-1346; and has a length of 45-50 (e.g., 45, 46, 47, 48, 49, or 50) amino acids.

[0471] An HNH polypeptide can comprise an amino acid sequence having at least 75%, at least 80%, at least 85%, at least 90%, at least 95%, at least 98%, at least 99%, or 100%, amino acid sequence identity to a contiguous stretch of from 100 to 134 amino acids of amino acids 776-909 of the S. pyogenes Cas9 amino acid sequence set forth in SEQ ID NO: 1545, or a corresponding segment of a Cas9 polypeptide amino acid sequence set forth in any of SEQ ID NOs: 1-259 and 795-1346; and can have a length of from 90 amino acids to 150 amino acids, e.g., from 90 amino acids to 95 amino acids, from 95 to amino acids to 100 amino acids, from 100 amino acids to 125 amino acids, from 125 amino acids to 130 amino acids, from 130 amino acids to 135 amino acids, from 135 amino acids to 140 amino acids, from 140 amino acids to 145 amino acids, or from 145 amino acids to 150 amino acids. In some cases, an HNH polypeptide comprises an amino acid sequence having at least 75%, at least 80%, at least 85%, at least 90%, at least 95%, at least 98%, at least 99%, or 100%, amino acid sequence identity to amino acids 776-909 of the S. pyogenes Cas9 amino acid sequence set forth in SEQ ID NO: 1545, or a corresponding segment of a Cas9 polypeptide amino acid sequence set forth in any of SEQ ID NOs: 1-259 and 795-1346; and has a length of from 130 amino acids to 140 amino acids (e.g., 130, 131, 132, 133, 134, 135, 136, 137, 138, 139, or 140 amino acids).

[0472] Examples of First Fusion Polypeptides

[0473] In some embodiments, a first fusion polypeptide comprises an amino acid sequence having at least 75%, at least 80%, at least 85%, at least 90%, at least 95%, at least 98%, at least 99%, or 100%, amino acid sequence identity to amino acids 82-829 of the amino acid sequence depicted in the following paragraph. In some cases, the fusion partner is linked, directly or via a linker, to the N-terminus of the polypeptide. For example, in some cases, a first fusion polypeptide comprises, in order from N-terminus to C-terminus: a) a fusion partner; and b) a polypeptide comprising an amino acid sequence having at least 75%, at least 80%, at least 85%, at least 90%, at least 95%, at least 98%, at least 99%, or 100%, amino acid sequence identity to amino acids 82-829 of the amino acid sequence amino acid sequence depicted in the following paragraph. Suitable fusion partners include a first member of a dimerization pair, where suitable first members of a dimerization pair are described elsewhere herein. In some cases, a first fusion polypeptide comprises, in order from N-terminus to C-terminus: a) an NLS; b) a fusion partner; and c) a polypeptide comprising an amino acid sequence having at least 75%, at least 80%, at least 85%, at least 90%, at least 95%, at least 98%, at least 99%, or 100%, amino acid sequence identity to amino acids 82-829 of the amino acid sequence depicted in the following paragraph. In some cases, a first fusion polypeptide comprises, in order from N-terminus to C-terminus: a) an NLS; b) a fusion partner; c) a polypeptide comprising an amino acid sequence having at least 75%, at least 80%, at least 85%, at least 90%, at least 95%, at least 98%, at least 99%, or 100%, amino acid sequence identity to amino acids 82-829 of the amino acid sequence depicted in the following paragraph; and d) a fusion partner.

(SEQ ID NO: 1595)
MDYKDHDGDYKDHDIDYKDDDDKMAPKKKRKVGIHGVPAASIAATLENDL
ARLENENARLEKDIANLERDLAKLEREEAYFGGSGGSGGSASGQGDSLHE
HIANLAGSPAIKKGILQTVKVVDELVKVMGRHKPENIVIEMARENQTTQK
GQKNSRERMKRIEEGIKELGSQILKEHPVENTQLQNEKLYLYYLQNGRDM
YVDQELDINRLSDYDVDHIVPQSFLKDDSIDNKVLTRSDKNRGKSDNVPS
EEVVKKMKNYWRQLLNAKLITQRKFDNLTKAERGGLSELDKAGFIKRQLV
ETRQITKHVAQILDSRMNTKYDENDKLIREVKVITLKSKLVSDFRKDFQF
YKVREINNYHHAHDAYLNAVVGTALIKKYPKLESEFVYGDYKVYDVRKMI
AKSEQEIGKATAKYFFYSNIMNFFKTEITLANGEIRKRPLIETNGETGEI
VWDKGRDFATVRKVLSMPQVNIVKKTEVQTGGFSKESILPKRNSDKLIAR
KKDWDPKKYGGFDSPTVAYSVLVVAKVEKGKSKKLKSVKELLGITIMERS
SFEKNPIDFLEAKGYKEVKKDLIIKLPKYSLFELENGRKRMLASAGELQK
GNELALPSKYVNFLYLASHYEKLKGSPEDNEQKQLFVEQHKHYLDEIIEQ
ISEFSKRVILADANLDKVLSAYNKHRDKPIREQAENIIHLFTLTNLGAPA
AFKYFDTTIDRKRYTSTKEVLDATLIHQSITGLYETRIDLSQLGGDGSGG
SGGSGGSGGSGGSGGSGGSGGVDDKKYSIGLDIGTNSVGWAVITDEYKVP
SKKFKVLGNTDRHSIKKNLIGALLFDSGEKRPAATKKAGQAKKKK

[0474] In some embodiments, a first fusion polypeptide comprises an amino acid sequence having at least 75%, at least 80%, at least 85%, at least 90%, at least 95%, at least 98%, at least 99%, or 100%, amino acid sequence identity to amino acids 82-820 of the amino acid sequence depicted in the following paragraph. In some cases, the fusion partner is linked, directly or via a linker, to the N-terminus of the polypeptide. For example, in some cases, a first fusion polypeptide comprises, in order from N-terminus to C-terminus: a) a fusion partner; and b) a polypeptide comprising an amino acid sequence having at least 75%, at least 80%, at least 85%, at least 90%, at least 95%, at least 98%, at least 99%, or 100%, amino acid sequence identity to amino acids 82-820 of the amino acid sequence depicted in the following paragraph. Suitable fusion partners include a first member of a dimerization pair, where suitable first members of a dimerization pair are described elsewhere herein. In some cases, a first fusion polypeptide comprises, in order from N-terminus to C-terminus: a) an NLS; b) a fusion partner; and c) a polypeptide comprising an amino acid sequence having at least 75%, at least 80%, at least 85%, at least 90%, at least 95%, at least 98%, at least 99%, or 100%, amino acid sequence identity to amino acids 82-820 of the amino acid sequence depicted in the following paragraph. In some cases, a first fusion polypeptide comprises, in order from N-terminus to C-terminus: a) an NLS; b) a fusion partner; c) a polypeptide comprising an amino acid sequence having at least 75%, at least 80%, at least 85%, at least 90%, at least 95%, at least 98%, at least 99%, or 100%, amino acid sequence identity to amino acids 82-820 of the amino acid sequence depicted in the following paragraph; and d) a fusion partner.

(SEQ ID NO: 1596)
MDYKDHDGDYKDHDIDYKDDDDKMAPKKKRKVGIHGVPAASIAATLENDL
ARLENENARLEKDIANLERDLAKLEREEAYFGGSGGSGGSASGQGDNVPS
EEVVKKMKNYWRQLLNAKLITQRKFDNLTKAERGGLSELDKAGFIKRQLV
ETRQITKHVAQILDSRMNTKYDENDKLIREVKVITLKSKLVSDFRKDFQF
YKVREINNYHHAHDAYLNAVVGTALIKKYPKLESEFVYGDYKVYDVRKMI
AKSEQEIGKATAKYFFYSNIMNFFKTEITLANGEIRKRPLIETNGETGEI
VWDKGRDFATVRKVLSMPQVNIVKKTEVQTGGFSKESILPKRNSDKLIAR
KKDWDPKKYGGFDSPTVAYSVLVVAKVEKGKSKKLKSVKELLGITIMERS
SFEKNPIDFLEAKGYKEVKKDLIIKLPKYSLFELENGRKRMLASAGELQK
GNELALPSKYVNFLYLASHYEKLKGSPEDNEQKQLFVEQHKHYLDEIIEQ
ISEFSKRVILADANLDKVLSAYNKHRDKPIREQAENIIHLFTLTNLGAPA
AFKYFDTTIDRKRYTSTKEVLDATLIHQSITGLYETRIDLSQLGGDGSGG
SGGSGGSGGSGGSGGSGGSGGVDDKKYSIGLDIGTNSVGWAVITDEYKVP
SKKFKVLGNTDRHSIKKNLIGALLFDSGGSSGSPAIKKGILQTVKVVDEL
VKVMGRHKPENIVIEMARENQTTQKGQKNSRERMKRIEEGIKELGSQILK
EHPVENTQLQNEKLYLYYLQNGRDMYVDQELDINRLSDYDVDHIVPQSFL
KDDSIDNKVLTRSDKNRGKSEKRPAATKKAGQAKKKK.

[0475] Second Fusion Polypeptide

[0476] As described above, a Cas9 heterodimer comprises: A) a first fusion polypeptide comprising: a) a first, circular permuted, polypeptide that comprises: i) a RuvCI polypeptide; ii) a RuvCII polypeptide; iii) an HNH polypeptide; iv) a RuvCIII polypeptide; and v) a PAM-interacting polypeptide; and b) a first fusion partner, where the first fusion partner is a first member of a dimerization pair; and B) a second fusion polypeptide comprising: a) a second polypeptide that comprises an alpha-helical recognition region (e.g., an alpha helical lobe); and b) a second fusion partner, where the second fusion partner is a second member of the dimerization pair. In some cases, the fusion partner is at or near (e.g., within the first 50 amino acids of the N-terminus) the N-terminus of the second polypeptide. In some cases, the fusion partner is at or near (e.g., within the first 50 amino acids of the C-terminus) the C-terminus of the second polypeptide. In some cases, the fusion partner is located internally within the second fusion polypeptide.

[0477] In some cases, the second polypeptide comprises an a-helical lobe (also referred to as “an alpha-helical recognition region”) of a Cas9 polypeptide. For example, in some cases, the second polypeptide comprises an amino acid sequence having at least 75%, at least 80%, at least 85%, at least 90%, at least 95%, at least 98%, at least 99%, or 100%, amino acid sequence identity to a contiguous stretch of from 400 amino acids to 658 amino acids of amino acids 61 to 718 of the S. pyogenes Cas9 amino acid sequence set forth in SEQ ID NO: 1545, or a corresponding segment of a Cas9 polypeptide amino acid sequence set forth in any of SEQ ID NOs: 1-259 and 795-1346; and can have a length of from 400 amino acids to 800 amino acids, e.g., from 400 amino acids to 450 amino acids, from 450 amino acids to 500 amino acids, from 500 amino acids to 550 amino acids, from 550 amino acids to 600 amino acids, from 600 amino acids to 650 amino acids, from 650 amino acids to 700 amino acids, from 700 amino acids to 750 amino acids, or from 750 amino acids to 800 amino acids. In some cases, the second polypeptide comprises an amino acid sequence having at least 75%, at least 80%, at least 85%, at least 90%, at least 95%, at least 98%, at least 99%, or 100%, amino acid sequence identity to amino acids 61-718 of the S. pyogenes Cas9 amino acid sequence set forth in SEQ ID NO: 1545, or a corresponding segment of a Cas9 polypeptide amino acid sequence set forth in any of SEQ ID NOs: 1-259 and 795-1346; and has a length of from 650 amino acids to 660 amino acids (e.g., 650, 651, 652, 653, 654, 655, 656, 657, 658, 659, or 660 amino acids).

[0478] In some cases, the second polypeptide comprises an amino acid sequence having at least 75%, at least 80%, at least 85%, at least 90%, at least 95%, at least 98%, at least 99%, or 100%, amino acid sequence identity to a contiguous stretch of from 400 amino acids to 624 amino acids of amino acids 95 to 718 of the S. pyogenes Cas9 amino acid sequence set forth in SEQ ID NO: 1545, or a corresponding segment of a Cas9 polypeptide amino acid sequence set forth in any of SEQ ID NOs: 1-259 and 795-1346; and has a length of from about 400 amino acids to 800 amino acids, e.g., from 400 amino acids to 450 amino acids, from 450 amino acids to 500 amino acids, from 500 amino acids to 550 amino acids, from 550 amino acids to 600 amino acids, from 600 amino acids to 650 amino acids, from 650 amino acids to 700 amino acids, from 700 amino acids to 750 amino acids, or from 750 amino acids to 800 amino acids. In some cases, the second polypeptide comprises an amino acid sequence having at least 75%, at least 80%, at least 85%, at least 90%, at least 95%, at least 98%, at least 99%, or 100%, amino acid sequence identity to amino acids 95 to 718 of the S. pyogenes Cas9 amino acid sequence set forth in SEQ ID NO: 1545, or a corresponding segment of a Cas9 polypeptide amino acid sequence set forth in any of SEQ ID NOs: 1-259 and 795-1346; and has a length of from 620 amino acids to 630 amino acids (e.g., 620, 621, 622, 623, 624, 625, 626, 627, 628, 629, or 630 amino acids).

[0479] In some cases, the second fusion polypeptide comprises, in order from N-terminus to C-terminus: a) a second fusion partner; and b) a second polypeptide that comprises an alpha-helical recognition region. In some cases, the second fusion polypeptide comprises, in order from N-terminus to C-terminus: a) a second polypeptide that comprises an alpha-helical recognition region; and b) a second fusion partner.

[0480] In some cases, the second fusion polypeptide comprises a heterologous sequence that provides for subcellular localization (e.g., an NLS for targeting to the nucleus; a mitochondrial localization signal for targeting to the mitochondria; a chloroplast localization signal for targeting to a chloroplast; an ER retention signal; and the like). In some cases, the second fusion polypeptide includes 2 or more, 3 or more, 4 or more, or 5 or more NLSs. In some cases, an NLS is located at or near (e.g., within 75 amino acids, 50 amino acids, or 30 amino acids) the N-terminus and/or at or near (e.g., within 75 amino acids, 50 amino acids, or 30 amino acids) the C-terminus. In some cases, the second fusion polypeptide comprises an NLS.

[0481] For example, in some cases, the second fusion polypeptide comprises, in order from N-terminus to C-terminus: a) an NLS; b) a second fusion partner; and c) a second polypeptide that comprises an alpha-helical recognition region. In some cases, the second fusion polypeptide comprises, in order from N-terminus to C-terminus: a) an NLS; b) a second fusion partner; c) a second polypeptide that comprises an alpha-helical recognition region; and d) an NLS. In some cases, the second fusion polypeptide comprises, in order from N-terminus to C-terminus: a) an NLS; b) a second polypeptide that comprises an alpha-helical recognition region; and c) a second fusion partner. In some cases, the second fusion polypeptide comprises, in order from N-terminus to C-terminus: a) an NLS; b) a second polypeptide that comprises an alpha-helical recognition region; c) a second fusion partner; and d) an NLS. In some cases, the NLS comprises the amino acid sequence MAPKKKRKVGIHGVPAA (SEQ ID NO: 1546). In some cases, the NLS comprises the amino acid sequence KRPAATKKAGQAKKKK (SEQ ID NO: 1547). Other suitable NLS are described elsewhere herein.

[0482] An NLS can be at or near the N-terminus and/or the C-terminus. In some cases, the second fusion polypeptide comprises two or more NLSs (e.g., 3 or more, 4 or more, or 5 or more NLSs). In some cases, the second fusion polypeptide comprises one or more NLSs (e.g., 2 or more, 3 or more, or 4 or more NLSs) at or near the N-terminus and/or one or more NLSs (e.g., 2 or more, 3 or more, or 4 or more NLSs) at or near the C-terminus. The term “at or near” is used here because, as is known in the art, the NLS need not be at the actual terminus of a protein, but can be positioned near (e.g., within 100 amino acids of) an N- and/or C-terminus (e.g., within 80, within 75, within 60, within 55, within 50, within 45, within 40, within 35, or within 30 amino acids of the an N- and/or C-terminus).

[0483] In some cases, the second fusion polypeptide comprises one or more linker polypeptides. For example, a linker polypeptide can be interposed between any of: a) an NLS and a fusion partner; b) a fusion partner and an alpha-helical lobe; and c) an alpha-helical lobe and an NLS.

[0484] First and Second Fusion Partners

[0485] The first fusion partner of the first fusion polypeptide, and the second fusion partner of the second fusion polypeptide, of a Cas9 heterodimer constitute a “dimer pair.” A dimer pair is a pair of polypeptides that can dimerize with one another. Each member (each polypeptide) of the dimer pair can be part of a different polypeptide, and when the members of the binding pair (the dimer pair) are brought into close proximity with one another (e.g., bind to one another), the two different polypeptides (heterologous polypeptides) to which the dimer pair members are fused are brought into proximity with one another and can be said to dimerize (i.e., as a consequence of the members of the dimer pair dimerizing).

[0486] A Cas9 heterodimer comprises two polypeptides that can interact to form a complex (i.e., to form the heterodimeric Cas9 protein). A Cas9 heterodimer is also referred to herein as a “split Cas9” or a “split Cas9 protein.” The fusion partners present in the first fusion polypeptide and the second fusion polypeptide can be induced to dimerize by a dimerizing agent. When the fusion partners present in the first fusion polypeptide and the second fusion polypeptide dimerize, the first fusion polypeptide and the second fusion polypeptide dimerize. In the absence of the dimerizing agent, and in the absence of a guide RNA that includes a stem loop 2 and/or a stem loop 3, the first fusion polypeptide and the second fusion polypeptide do not dimerize. When the first fusion polypeptide and the second fusion polypeptide dimerize, the Cas9 heterodimer, together with a truncated guide RNA (e.g., a guide RNA that does not include stem loop 2 and/or stem loop 3), can bind a target nucleic acid. A Cas9 heterodimer and a truncated guide RNA form a “Cas9 heterodimer system,” described hereinbelow.

[0487] As an illustrative example, a Cas9 heterodimer comprises: A) a first fusion polypeptide (comprising a Cas9 nuclease lobe) and a first fusion partner (“a first member of a dimer pair”); and B) a second fusion polypeptide (comprising a Cas9 alpha-helical lobe) and a second fusion partner (“a second member of the dimer pair”). The first and second fusion polypeptides dimerize when the first and second binding members dimerize (when the first and second binding members are brought into close proximity with one another, e.g., via a dimerizer, via binding to one another, etc.). In some cases, the dimer pair is inducible such that the members of the dimer pair do not associate (e.g., come into proximity with one another, bind to one another, etc.) in the absence of induction (e.g., chemical induction, light induction, etc.). In some cases, the dimer pair is not inducible such that the members of the dimer pair bind to one another when both members are present (e.g., synzip polypeptides).

[0488] Any convenient dimer pair can used. Example dimer pairs suitable for use in a subject heterodimeric Cas9 protein include non-inducible binding pairs. For example, in some cases, each member of the binding pair is a protein domain that binds to the other member. As an illustrative example, in some cases, each member of the binding pair is a coiled-coil domain Examples of suitable coiled-coil domains include, but are not limited to:

SYNZIP14:
(SEQ ID NO: 1556)
NDLDAYEREAEKLEKKNEVLRNRLAALENELATLRQEVASMKQELQS
SYNZIP17:
(SEQ ID NO: 1557)
NEKEELKSKKAELRNRIEQLKQKREQLKQKIANLRKEIEAYK
SYNZIP18:
(SEQ ID NO: 1558)
SIAATLENDLARLENENARLEKDIANLERDLAKLEREEAYF

[0489] In some cases, each of the two members of a non-inducible binding pair comprise an amino acid sequence having 75% or more amino acid sequence identity (e.g., 80% or more, 85% or more, 90% or more, 95% or more, 98% or more, or 100%, amino acid sequence identity) to a coiled coil domain. In some cases, a member of a non-inducible binding pair includes an amino acid sequence having 75% or more amino acid sequence identity (e.g., 80% or more, 85% or more, 90% or more, 95% or more, 98% or more, or 100%, amino acid sequence identity) to SYNZIP14 (the amino acid sequence set forth in SEQ ID NO: 1556). In some cases, a member of a non-inducible binding pair includes an amino acid sequence having 75% or more amino acid sequence identity (e.g., 80% or more, 85% or more, 90% or more, 95% or more, 98% or more, or 100%, amino acid sequence identity) to SYNZIP17 (the amino acid sequence set forth in SEQ ID NO: 1557). In some cases, a member of a non-inducible binding pair includes an amino acid sequence having 75% or more amino acid sequence identity (e.g., 80% or more, 85% or more, 90% or more, 95% or more, 98% or more, or 100%, amino acid sequence identity) to SYNZIP18 (the amino acid sequence set forth in SEQ ID NO: 1558).

[0490] In some cases, one member of a non-inducible binding pair includes an amino acid sequence having 75% or more amino acid sequence identity (e.g., 80% or more, 85% or more, 90% or more, 95% or more, 98% or more, or 100%, amino acid sequence identity) to SYNZIP17 (the amino acid sequence set forth in SEQ ID NO: 1557); and the other member of the non-inducible binding pair includes an amino acid sequence having 75% or more amino acid sequence identity (e.g., 80% or more, 85% or more, 90% or more, 95% or more, 98% or more, or 100%, amino acid sequence identity) to SYNZIP18 (the amino acid sequence set forth in SEQ ID NO: 1558). For example, in some cases, the two members of a non-inducible binding pair are SYNZIP17 and SYNZIP18.

[0491] In some cases, one member of a non-inducible binding pair includes an amino acid sequence having 75% or more amino acid sequence identity (e.g., 80% or more, 85% or more, 90% or more, 95% or more, 98% or more, or 100%, amino acid sequence identity) to SYNZIP14 (the amino acid sequence set forth in SEQ ID NO: 1556); and the other member of the non-inducible binding pair includes an amino acid sequence having 75% or more amino acid sequence identity (e.g., 80% or more, 85% or more, 90% or more, 95% or more, 98% or more, or 100%, amino acid sequence identity) to SYNZIP17 (the amino acid sequence set forth in SEQ ID NO: 1557). For example, in some cases, the two members of a non-inducible binding pair are SYNZIP14 and SYNZIP17.

[0492] Example dimer pairs suitable for use in a subject Cas9 heterodimer also include inducible binding pairs (binding pairs that can be induced to dimerize, e.g., with a dimerizer, as discussed in more detail below). Dimerizer-binding pairs suitable for use in a Cas9 heterodimer are in some embodiments polypeptides (e.g. protein domains) that bind to a different site of the same molecule (referred to herein as a “dimerizer”). In the presence of a dimerizer, both members of a dimerizer-binding pair bind to the dimerizer (e.g., in some cases each binding to a different site of the dimerizer) and are thus brought into proximity with one another. This can also be referred to as chemically-inducible dimerization (CID) (e.g., see DeRose et al, Pflugers Arch. 2013 March; 465(3):409-17, which is hereby incorporated by reference in its entirety). In some embodiments, binding to the dimerizer is reversible. In some embodiments, binding to the dimerizer is irreversible. In some embodiments, binding to the dimerizer is non-covalent. In some embodiments, binding to the dimerizer is covalent.

[0493] Dimer pairs suitable for use include dimerizer-binding pairs that dimerize upon binding of a first member of a dimer pair to a dimerizing agent and of a second member of the dimer pair to the same dimerizing agent. Dimer pairs suitable for use also include dimerizer-binding pairs that dimerize upon binding of a first member of a dimer pair to a dimerizing agent, where the dimerizing agent induces a conformational change in the first member of the dimer pair, and where the conformational change allows the first member of the dimer pair to bind (covalently or non-covalently) to a second member of the dimer pair. Other dimer pairs suitable for use include dimer pairs in which exposure to light (e.g., blue light) induces dimerization of the dimer pair.

[0494] Regardless of the mechanism, an inducible dimer pair will dimerize upon exposure to an agent that induces dimerization, where the agent is in some cases a small molecule, or, for example, in other cases, light. Thus, for simplicity, the discussion below referring to “dimerizer-binding pairs” includes dimer pairs that dimerize regardless of the mechanism.

[0495] Non-limiting examples of suitable dimers (e.g., dimerizer-binding pairs) include, but are not limited to:
[0496] (a) FKBP1A (FK506 binding protein) (e.g., a rapamycin binding portion) paired with FKBP1A (e.g., a rapamycin binding portion): dimerization induced by rapamycin and/or rapamycin analogs known as rapalogs;
[0497] (b) FKBP1A (e.g., a rapamycin binding portion) and FRB (Fkbp-Rapamycin Binding Domain): dimerization induced by rapamycin and/or rapamycin analogs known as rapalogs;
[0498] (c) FKBP1A (e.g., a rapamycin binding portion) and CnA (calcineurin catalytic subunit A): dimerization induced by rapamycin and/or rapamycin analogs known as rapalogs;
[0499] (d) FKBP1A (e.g., a rapamycin binding portion) and cyclophilin: dimerization induced by rapamycin and/or rapamycin analogs known as rapalogs;
[0500] (e) GyrB (Gyrase B) and GyrB: dimerization induced by coumermycin;
[0501] (f) DHFR (dihydrofolate reductase) and DHFR: dimerization induced by methotrexate);
[0502] (g) DmrB and DmrB: dimerization induced by AP20187;
[0503] (h) PYL and ABI: dimerization induced by abscisic acid;
[0504] (i) Cry2 and CIB1: dimerization induced by blue light; and
[0505] (j) GAI and GID1: dimerization induced by gibberellin.

[0506] A member (a first and/or a second member) of a binding pair (e.g., a dimerizer-binding pair) of a subject Cas9 heterodimer can have a length in a range of from 35 to 300 amino acids (e.g., from 35 to 250, from 35 to 200, from 35 to 150, from 35 to 100, from 35 to 50, from 50 to 300, from 50 to 250, from 50 to 200, from 50 to 150, from 50 to 100, from 100 to 300, from 100 to 250, from 100 to 200, from 100 to 150, from 150 to 300, from 150 to 250, from 150 to 200, from 200 to 300, from 200 to 250, or from 250 to 300 amino acids).

[0507] In some cases, a member of a dimer (e.g., a dimerizer-binding pair) of a subject Cas9 heterodimer is derived from FKBP1A (also known as FKBP12, FKBP1; PKC12; PKCI2; PPIASE; FKBP-12; FKBP-1A). For example, a suitable dimerizer-binding pair member can include a rapamycin binding portion of FKBP1A. For example, a suitable dimerizer-binding pair member can comprise an amino acid sequence having 75% or more amino acid sequence identity (e.g., 80% or more, 85% or more, 90% or more, 95% or more, 98% or more, or 100% amino acid sequence identity) to the following amino acid sequence (a rapamycin binding portion of FKBP1A):

(SEQ ID NO: 1559)
GVQVETISPGDGRTFPKRGQTCVVHYTGMLEDGKKFDSSRDRNKPFKFML
GKQEVIRGWEEGVAQMSVGQRAKLTISPDYAYGATGHPGIIPPHATLVFD
VELLKLE.

[0508] In some cases, a member of a dimerizer-binding pair of a Cas9 heterodimer is derived from protein phosphatase 3, catalytic subunit, alpha isozyme (PPP3CA) (also known as “Serine/threonine-protein phosphatase 2B catalytic subunit alpha isoform”; CNA; CALN; CALNA; CALNA1; CCN1; CNA1; PPP2B; “CAM-PRP catalytic subunit”; and “calmodulin-dependent calcineurin A subunit alpha isoform”). For example, a suitable dimerizer-binding pair member can include a binding portion of PPP3CA. For example, a suitable dimerizer-binding pair member can comprise an amino acid sequence having 75% or more amino acid sequence identity (e.g., 80% or more, 85% or more, 90% or more, 95% or more, 98% or more, or 100% amino acid sequence identity) to the following amino acid sequence (PP2Ac domain):

(SEQ ID NO: 1560)
LEESVALRIITEGASILRQEKNLLDIDAPVTVCGDIHGQFFDLMKLFEVG
GSPANTRYLFLGDYVDRGYFSIECVLYLWALKILYPKTLFLLRGNHECRH
LTEYFTFKQECKIKYSERVYDACMDAFDCLPLAALMNQQFLCVHGGLSPE
INTLDDIRKLDRFKEPPAYGPMCDILWSDPLEDFGNEKTQEHFTHNTVRG
CSYFYSYPAVCEFLQHNNLLSILRAHEAQDAGYRMYRKSQTTGFPSLITI
FSAPNYLDVYNNKAAVLKYENNVMNIRQFNCSPHPYWLPNFM.

[0509] In some cases, a member of a dimer (e.g., a dimerizer-binding pair) is derived from cyclophilin (also known cyclophilin A, PPIA, CYPA, CYPH, PPIase A, etc.). For example, a suitable dimerizer-binding pair member can include a binding portion of cyclophilin. For example, a suitable dimerizer-binding pair member can include an amino acid sequence having 75% or more amino acid sequence identity (e.g., 80% or more, 85% or more, 90% or more, 95% or more, 98% or more, or 100% amino acid sequence identity) to the following amino acid sequence:

(SEQ ID NO: 1561)
MVNPTVFFDIAVDGEPLGRVSFELFADKVPKTAENFRALSTGEKGFGYKG
SCFHRIIPGFMCQGGDFTRHNGTGGKSIYGEKFEDENFILKHTGPGILSM
ANAGPNTNGSQFFICTAKTEWLDGKHVVFGKVKEGMNIVEAMERFGSRNG
KTSKKITIADCGQLE.

[0510] In some cases, a member of a dimer (e.g., a dimerizer-binding pair) is derived from MTOR (also known as FKBP-rapamycin associated protein; FK506 binding protein 12-rapamycin associated protein 1; FK506 binding protein 12-rapamycin associated protein 2; FK506-binding protein 12-rapamycin complex-associated protein 1; FRAP; FRAP1; FRAP2; RAFT1; and RAPT1). For example, a suitable dimerizer-binding pair member can include the Fkbp-Rapamycin Binding Domain (also known as FRB). For example, a suitable dimerizer-binding pair member can include an amino acid sequence having 75% or more amino acid sequence identity (e.g., 80% or more, 85% or more, 90% or more, 95% or more, 98% or more, or 100% amino acid sequence identity) to the following amino acid sequence (FRB):

(SEQ ID NO: 1562)
VAILWHEMWHEGLEEASRLYFGERNVKGMFEVLEPLHAMMERGPQTLKET
SFNQAYGRDLMEAQEWCRKYMKSGNVKDLTQAWDLYYHVFRRIS.

[0511] In some cases, a member of a dimer (e.g., a dimerizer-binding pair) is derived from GyrB (also known as DNA gyrase subunit B). For example, a suitable dimerizer-binding pair member can include an amino acid sequence having 75% or more amino acid sequence identity (e.g., 80% or more, 85% or more, 90% or more, 95% or more, 98% or more, or 100% amino acid sequence identity) to a contiguous stretch of from about 100 amino acids to about 200 amino acids (aa), from about 200 aa to about 300 aa, from about 300 aa to about 400 aa, from about 400 aa to about 500 aa, from about 500 aa to about 600 aa, from about 600 aa to about 700 aa, or from about 700 aa to about 800 aa, of the following GyrB amino acid sequence from Escherichia coli (or to the DNA gyrase subunit B sequence from any organism): MSNSYDSSSIKVLKGLDAVRKRPGMYIGDTDDGTGLHHMVFEVVDNAIDEALAGHCKE IIVTIHADNSVSVQDDGRGIPTGIHPEEGVSAAEVIMTVLHAGGKFDDNSYKVSGGLHGV GVSVVNALSQKLELVIQREGKIHRQIYEHGVPQAPLAVTGETEKTGTMVRFWPSLETFT NVTEFEYEILAKRLRELSFLNSGVSIRLRDKRDGKEDHFHYEGGIKAFVEYLNKNKTPIH PNIFYFSTEKDGIGVEVALQWNDGFQENIYCFTNNIPQRDGGTHLAGFRAAMTRTLNAY MDKEGYSKKAKVSATGDDAREGLIAVVSVKVPDPKFSSQTKDKLVSSEVKSAVEQQM NELLAEYLLENPTDAKIVVGKIIDAARAREAARRAREMTRRKGALDLAGLPGKLADCQ ERDPALSELYLVEGDSAGGSAKQGRNRKNQAILPLKGKILNVEKARFDKMLSSQEVATL ITALGCGIGRDEYNPDKLRYHSIIIMTDADVDGSHIRTLLLTFFYRQMPEIVERGHVYIAQ PPLYKVKKGKQEQYIKDDEAMDQYQISIALDGATLHTNASAPALAGEALEKLVSEYNA TQKMINRMERRYPKAMLKELIYQPTLTEADLSDEQTVTRWVNALVSELNDKEQHGSQ WKFDVHTNAEQNLFEPIVRVRTHGVDTDYPLDHEFITGGEYRRICTLGEKLRGLLEEDA FIERGERRQPVASFEQALDWLVKESRRGLSIQRYKGLGEMNPEQLWETTMDPESRRML RVTVKDAIAADQLFTTLMGDAVEPRRAFIEENALKAANIDI (SEQ ID NO:1563). In some cases, a member of a dimerizer-binding pair includes an amino acid sequence having 75% or more amino acid sequence identity (e.g., 80% or more, 85% or more, 90% or more, 95% or more, 98% or more, or 100% amino acid sequence identity) to amino acids 1-220 of the above-listed GyrB amino acid sequence from Escherichia coli.

[0512] In some cases, a member of a dimer (e.g., a dimerizer-binding pair) is derived from DHFR (also known as dihydrofolate reductase, DHFRP1, and DYR). For example, a suitable dimerizer-binding pair member can include an amino acid sequence having 75% or more amino acid sequence identity (e.g., 80% or more, 85% or more, 90% or more, 95% or more, 98% or more, or 100% amino acid sequence identity) to the following amino acid sequence:

(SEQ ID NO: 1564)
MVGSLNCIVAVSQNMGIGKNGDLPWPPLRNEFRYFQRMTTTSSVEGKQN
LVIMGKKTWFSIPEKNRPLKGRINLVLSRELKEPPQGAHFLSRSLDDAL
KLTEQPELANKVDMVWIVGGSSVYKEAMNHPGHLKLFVTRIMQDFESDT
FFPEIDLEKYKLLPEYPGVLSDVQEEKGIKYKFEVYEKND.

[0513] In some cases, a member of a dimer (e.g., a dimerizer-binding pair) is derived from the DmrB binding domain (i.e., DmrB homodimerization domain). For example, a suitable dimerizer-binding pair member can include an amino acid sequence having 75% or more amino acid sequence identity (e.g., 80% or more, 85% or more, 90% or more, 95% or more, 98% or more, or 100% amino acid sequence identity) to the following amino acid sequence:

(SEQ ID NO: 1565)
MASRGVQVETISPGDGRTFPKRGQTCVVHYTGMLEDGKKVDSSRDRNKPF
KFMLGKQEVIRGWEEGVAQMSVGQRAKLTISPDYAYGATGHPGIIPPHAT
LVFDVELLKLE.

[0514] In some cases, a member of a dimer (e.g., a dimerizer-binding pair) is derived from a PYL protein (also known as abscisic acid receptor and as RCAR). For example a member of a subject dimerizer-binding pair can be derived from proteins such as those of Arabidopsis thaliana: PYR1, RCAR1(PYL9), PYL1, PYL2, PYL3, PYL4, PYLS, PYL6, PYL7, PYL8 (RCAR3), PYL10, PYL11, PYL12, PYL13. For example, a suitable dimerizer-binding pair member can include an amino acid sequence having 75% or more amino acid sequence identity (e.g., 80% or more, 85% or more, 90% or more, 95% or more, 98% or more, or 100% amino acid sequence identity) to the following amino acid sequences:

PYL10:
(SEQ ID NO: 1566)
MNGDETKKVESEYIKKHHRHELVESQCSSTLVKHIKAPLHLVWSIVRRFD
EPQKYKPFISRCVVQGKKLEVGSVREVDLKSGLPATKSTEVLEILDDNEH
ILGIRIVGGDHRLKNYSSTISLHSETIDGKTGTLAIESFVVDVPEGNTKE
ETCFFVEALIQCNLNSLADVTERLQAESMEKKI.
PYL11:
(SEQ ID NO: 1567)
METSQKYHTCGSTLVQTIDAPLSLVWSILRRFDNPQAYKQFVKTCNLSSG
DGGEGSVREVTVVSGLPAEFSRERLDELDDESHVMMISIIGGDHRLVNYR
SKTMAFVAADTEEKTVVVESYVVDVPEGNSEEETTSFADTIVGFNLKSLA
KLSERVAHLKL
PYL12:
(SEQ ID NO: 1568)
MKTSQEQHVCGSTVVQTINAPLPLVWSILRRFDNPKTFKHFVKTCKLRSGD
GGEGSVREVTVVSDLPASFSLERLDELDDESHVMVISIIGGDHRLVNYQSK
TTVFVAAEEEKTVVVESYVVDVPEGNTEEETTLFADTIVGCNLRSLAKLSE
KMMELT.
PYL13:
(SEQ ID NO: 1569)
MESSKQKRCRSSVVETIEAPLPLVWSILRSFDKPQAYQRFVKSCTMRSGGG
GGKGGEGKGSVRDVTLVSGFPADFSTERLEELDDESHVMVVSIIGGNHRLV
NYKSKTKVVASPEDMAKKTVVVESYVVDVPEGTSEEDTIFFVDNIIRYNLT
SLAKLTKKMMK.
PYL1:
(SEQ ID NO: 1570)
MANSESSSSPVNEEENSQRISTLHHQTMPSDLTQDEFTQLSQSIAEFHTYQ
LGNGRCSSLLAQRIHAPPETVWSVVRRFDRPQIYKHFIKSCNVSEDFEMRV
GCTRDVNVISGLPANTSRERLDLLDDDRRVTGFSITGGEHRLRNYKSVTTV
HRFEKEEEEERIWTVVLESYVVDVPEGNSEEDTRLFADTVIRLNLQKLASI
TEAMNRNNNNNNSSQVR.
PYL2:
(SEQ ID NO: 1571)
MSSSPAVKGLTDEEQKTLEPVIKTYHQFEPDPTTCTSLITQRIHAPASVVW
PLIRRFDNPERYKHFVKRCRLISGDGDVGSVREVTVISGLPASTSTERLEF
VDDDHRVLSFRVVGGEHRLKNYKSVTSVNEFLNQDSGKVYTVVLESYTVDI
PEGNTEEDTKMFVDTVVKLNLQKLGVAATSAPMHDDE.
PYL3:
(SEQ ID NO: 1572)
MNLAPIHDPSSSSTTTTSSSTPYGLTKDEFSTLDSIIRTHHTFPRSPNTCT
SLIAHRVDAPAHAIWRFVRDFANPNKYKHFIKSCTIRVNGNGIKEIKVGTI
REVSVVSGLPASTSVEILEVLDEEKRILSFRVLGGEHRLNNYRSVTSVNEF
VVLEKDKKKRVYSVVLESYIVDIPQGNTEEDTRMFVDTVVKSNLQNLAVIS
TASPT.
PYL4:
(SEQ ID NO: 1573)
MLAVHRPSSAVSDGDSVQIPMMIASFQKRFPSLSRDSTAARFHTHEVGPN
QCCSAVIQEISAPISTVWSVVRRFDNPQAYKHFLKSCSVIGGDGDNVGSL
RQVHVVSGLPAASSTERLDILDDERHVISFSVVGGDHRLSNYRSVTTLHP
SPISGTVVVESYVVDVPPGNTKEETCDFVDVIVRCNLQSLAKIAENTAAE
SKKKMSL.
PYL5:
(SEQ ID NO: 1574)
MRSPVQLQHGSDATNGFHTLQPHDQTDGPIKRVCLTRGMHVPEHVAMHHT
HDVGPDQCCSSVVQMIHAPPESVWALVRRFDNPKVYKNFIRQCRIVQGDG
LHVGDLREVMVVSGLPAVSSTERLEILDEERHVISFSVVGGDHRLKNYRS
VTTLHASDDEGTVVVESYIVDVPPGNTEEETLSFVDTIVRCNLQSLARST
NRQ.
PYL6:
(SEQ ID NO: 1575)
MPTSIQFQRSSTAAEAANATVRNYPHHHQKQVQKVSLTRGMADVPEHVEL
SHTHVVGPSQCFSVVVQDVEAPVSTVWSILSRFEHPQAYKHFVKSCHVVI
GDGREVGSVREVRVVSGLPAAFSLERLEIMDDDRHVISFSVVGGDHRLMN
YKSVTTVHESEEDSDGKKRTRVVESYVVDVPAGNDKEETCSFADTIVRCN
LQSLAKLAENTSKFS.
PYL7:
(SEQ ID NO: 1576)
MEMIGGDDTDTEMYGALVTAQSLRLRHLHHCRENQCTSVLVKYIQAPVHL
VWSLVRRFDQPQKYKPFISRCTVNGDPEIGCLREVNVKSGLPATTSTERL
EQLDDEEHILGINIIGGDHRLKNYSSILTVHPEMIDGRSGTMVMESFVVD
VPQGNTKDDTCYFVESLIKCNLKSLACVSERLAAQDITNSIATFCNASNG
YREKNHTETNL.
PYL8:
(SEQ ID NO: 1577)
MEANGIENLTNPNQEREFIRRHHKHELVDNQCSSTLVKHINAPVHIVWSL
VRRFDQPQKYKPFISRCVVKGNMEIGTVREVDVKSGLPATRSTERLELLD
DNEHILSIRIVGGDHRLKNYSSIISLHPETIEGRIGTLVIESFVVDVPEG
NTKDETCYFVEALIKCNLKSLADISERLAVQDTTESRV.
PYL9:
(SEQ ID NO: 1578)
MMDGVEGGTAMYGGLETVQYVRTHHQHLCRENQCTSALVKHIKAPLHLVW
SLVRRFDQPQKYKPFVSRCTVIGDPEIGSLREVNVKSGLPATTSTERLEL
LDDEEHILGIKIIGGDHRLKNYSSILTVHPEIIEGRAGTMVIESFVVDVP
QGNTKDETCYFVEALIRCNLKSLADVSERLASQDITQ.
PYR1:
(SEQ ID NO: 1579)
MPSELTPEERSELKNSIAEFHTYQLDPGSCSSLHAQRIHAPPELVWSIVR
RFDKPQTYKHFIKSCSVEQNFEMRVGCTRDVIVISGLPANTSTERLDILD
DERRVTGFSIIGGEHRLTNYKSVTTVHRFEKENRIWTVVLESYVVDMPEG
NSEDDTRMFADTVVKLNLQKLATVAEAMARNSGDGSGSQVT.

[0515] In some cases, a member of a dimer (e.g., a dimerizer-binding pair) is derived from an ABI protein (also known as Abscisic Acid-Insensitive). For example a member of a subject dimerizer-binding pair can be derived from proteins such as those of Arabidopsis thaliana: ABI1 (Also known as ABSCISIC ACID-INSENSITIVE 1, Protein phosphatase 2C 56, AtPP2C56, P2C56, and PP2C ABI1) and/or ABI2 (also known as P2C77, Protein phosphatase 2C 77, AtPP2C77, ABSCISIC ACID-INSENSITIVE 2, Protein phosphatase 2C ABI2, and PP2C ABI2). For example, a suitable dimerizer-binding pair member can include an amino acid sequence having 75% or more amino acid sequence identity (e.g., 80% or more, 85% or more, 90% or more, 95% or more, 98% or more, or 100% amino acid sequence identity) to a contiguous stretch of from about 100 amino acids to about 110 amino acids (aa), from about 110 aa to about 115 aa, from about 115 aa to about 120 aa, from about 120 aa to about 130 aa, from about 130 aa to about 140 aa, from about 140 aa to about 150 aa, from about 150 aa to about 160 aa, from about 160 aa to about 170 aa, from about 170 aa to about 180 aa, from about 180 aa to about 190 aa, or from about 190 aa to about 200 aa of any of the following amino acid sequences:

ABI1:
(SEQ ID NO: 1580)
MEEVSPAIAGPFRPFSETQMDFTGIRLGKGYCNNQYSNQDSENGDLMVS
LPETSSCSVSGSHGSESRKVLISRINSPNLNMKESAAADIVVVDISAGD
EINGSDITSEKKMISRTESRSLFEFKSVPLYGFTSICGRRPEMEDAVST
IPRFLQSSSGSMLDGRFDPQSAAHFFGVYDGHGGSQVANYCRERMHLAL
AEEIAKEKPMLCDGDTWLEKWKKALFNSFLRVDSEIESVAPETVGSTSV
VAVVFPSHIFVANCGDSRAVLCRGKTALPLSVDHKPDREDEAARIEAAG
GKVIQWNGARVFGVLAMSRSIGDRYLKPSIIPDPEVTAVKRVKEDDCLI
LASDGVWDVMTDEEACEMARKRILLWHKKNAVAGDASLLADERRKEGKD
PAAMSAAEYLSKLAIQRGSKDNISVVVVDLKPRRKLKSKPLN.
ABI2:
(SEQ ID NO: 1581)
MDEVSPAVAVPFRPFTDPHAGLRGYCNGESRVTLPESSCSGDGAMKDSS
FEINTRQDSLTSSSSAMAGVDISAGDEINGSDEFDPRSMNQSEKKVLSR
TESRSLFEFKCVPLYGVTSICGRRPEMEDSVSTIPRFLQVSSSSLLDGR
VTNGFNPHLSAHFFGVYDGHGGSQVANYCRERMHLALTEEIVKEKPEFC
DGDTWQEKWKKALFNSFMRVDSEIETVAHAPETVGSTSVVAVVFPTHIF
VANCGDSRAVLCRGKTPLALSVDHKPDRDDEAARIEAAGGKVIRWNGAR
VFGVLAMSRSIGDRYLKPSVIPDPEVTSVRRVKEDDCLILASDGLWDVM
TNEEVCDLARKRILLWHKKNAMAGEALLPAEKRGEGKDPAAMSAAEYLS
KMALQKGSKDNISVVVVDLKGIRKFKSKSLN.

[0516] In some cases, a member of a dimer (e.g., a dimerizer-binding pair) is derived from a Cry2 protein (also known as cryptochrome 2). For example a member of a subject dimer (e.g., a dimerizer-binding pair) can be derived from Cry2 proteins from any organism (e.g., a plant) such as, but not limited to, those of Arabidopsis thaliana. For example, a suitable dimerizer-binding pair member can include an amino acid sequence having 75% or more amino acid sequence identity (e.g., 80% or more, 85% or more, 90% or more, 95% or more, 98% or more, or 100% amino acid sequence identity) to a contiguous stretch of from about 100 amino acids to about 110 amino acids (aa), from about 110 aa to about 115 aa, from about 115 aa to about 120 aa, from about 120 aa to about 130 aa, from about 130 aa to about 140 aa, from about 140 aa to about 150 aa, from about 150 aa to about 160 aa, from about 160 aa to about 170 aa, from about 170 aa to about 180 aa, from about 180 aa to about 190 aa, or from about 190 aa to about 200 aa of any of the following amino acid sequences:

[0517] Cry2 (Arabidopsis Thaliana)

(SEQ ID NO: 1582)
MKMDKKTIVWFRRDLRIEDNPALAAAAHEGSVFPVFIWCPEEEGQFYPGR
ASRWWMKQSLAHLSQSLKALGSDLTLIKTHNTISAILDCIRVTGATKVVF
NHLYDPVSLVRDHTVKEKLVERGISVQSYNGDLLYEPWEIYCEKGKPFTS
FNSYWKKCLDMSIESVMLPPPWRLMPITAAAEAIWACSIEELGLENEAEK
PSNALLTRAWSPGWSNADKLLNEFIEKQLIDYAKNSKKVVGNSTSLLSPY
LHFGEISVRHVFQCARMKQIIWARDKNSEGEESADLFLRGIGLREYSRYI
CFNFPFTHEQSLLSHLRFFPWDADVDKFKAWRQGRTGYPLVDAGMRELWA
TGWMHNRIRVIVSSFAVKFLLLPWKWGMKYFWDTLLDADLECDILGWQYI
SGSIPDGHELDRLDNPALQGAKYDPEGEYIRQWLPELARLPTEWIHHPWD
APLTVLKASGVELGTNYAKPIVDIDTARELLAKAISRTREAQIMIGAAPD
EIVADSFEALGANTIKEPGLCPSVSSNDQQVPSAVRYNGSKRVKPEEEEE
RDMKKSRGFDERELFSTAESSSSSSVFFVSQSCSLASEGKNLEGIQDSSD
QITTSLGKNGCK.

[0518] In some cases, a member of a dimer (e.g., a dimerizer-binding pair) is derived from the CIB1 Arabidopsis thaliana protein (also known as transcription factor bHLH63). For example, a suitable dimer (e.g., a dimerizer-binding pair) member can include an amino acid sequence having 75% or more amino acid sequence identity (e.g., 80% or more, 85% or more, 90% or more, 95% or more, 98% or more, or 100% amino acid sequence identity) to a contiguous stretch of from about 100 amino acids to about 110 amino acids (aa), from about 110 aa to about 115 aa, from about 115 aa to about 120 aa, from about 120 aa to about 130 aa, from about 130 aa to about 140 aa, from about 140 aa to about 150 aa, from about 150 aa to about 160 aa, from about 160 aa to about 170 aa, from about 170 aa to about 180 aa, from about 180 aa to about 190 aa, or from about 190 aa to about 200 aa of the following amino acid sequence:

(SEQ ID NO: 1583)
MNGAIGGDLLLNFPDMSVLERQRAHLKYLNPTFDSPLAGFFADSSMITGG
EMDSYLSTAGLNLPMMYGETTVEGDSRLSISPETTLGTGNFKKRKFDTET
KDCNEKKKKMTMNRDDLVEEGEEEKSKITEQNNGSTKSIKKMKHKAKKEE
NNFSNDSSKVTKELEKTDYIHVRARRGQATDSHSIAERVRREKISERMKF
LQDLVPGCDKITGKAGMLDEIINYVQSLQRQIEFLSMKLAIVNPRPDFDM
DDIFAKEVASTPMTVVPSPEMVLSGYSHEMVHSGYSSEMVNSGYLHVNPM
QQVNTSSDPLSCFNNGEAPSMWDSHVQNLYGNLGV.

[0519] In some cases, a member of a dimer (e.g., a dimerizer-binding pair) is derived from the GAI Arabidopsis thaliana protein (also known as Gibberellic Acid Insensitive, and DELLA protein GAI). For example, a suitable dimerizer-binding pair member can include an amino acid sequence having 75% or more amino acid sequence identity (e.g., 80% or more, 85% or more, 90% or more, 95% or more, 98% or more, or 100% amino acid sequence identity) to a contiguous stretch of from about 100 amino acids to about 110 amino acids (aa), from about 110 aa to about 115 aa, from about 115 aa to about 120 aa, from about 120 aa to about 130 aa, from about 130 aa to about 140 aa, from about 140 aa to about 150 aa, from about 150 aa to about 160 aa, from about 160 aa to about 170 aa, from about 170 aa to about 180 aa, from about 180 aa to about 190 aa, or from about 190 aa to about 200 aa of the following amino acid sequence:

(SEQ ID NO: 1584)
MKRDHHHHHHQDKKTMMMNEEDDGNGMDELLAVLGYKVRSSEMADVAQKL
EQLEVMMSNVQEDDLSQLATETVHYNPAELYTWLDSMLTDLNPPSSNAEY
DLKAIPGDAILNQFAIDSASSSNQGGGGDTYTTNKRLKCSNGVVETTTAT
AESTRHVVLVDSQENGVRLVHALLACAEAVQKENLTVAEALVKQIGFLAV
SQIGAMRKVATYFAEALARRIYRLSPSQSPIDHSLSDTLQMHFYETCPYL
KFAHFTANQAILEAFQGKKRVHVIDFSMSQGLQWPALMQALALRPGGPPV
FRLTGIGPPAPDNFDYLHEVGCKLAHLAEAIHVEFEYRGFVANTLADLDA
SMLELRPSEIESVAVNSVFELHKLLGRPGAIDKVLGVVNQIKPEIFTVVE
QESNHNSPIFLDRFTESLHYYSTLFDSLEGVPSGQDKVMSEVYLGKQICN
VVACDGPDRVERHETLSQWRNRFGSAGFAAAHIGSNAFKQASMLLALFNG
GEGYRVEESDGCLMLGWHTRPLIATSAWKLSTN.

[0520] In some cases, a member of a dimer (e.g., a dimerizer-binding pair) is derived from a GID1 Arabidopsis thaliana protein (also known as Gibberellin receptor GID1). For example, a suitable dimer member can include an amino acid sequence having 75% or more amino acid sequence identity (e.g., 80% or more, 85% or more, 90% or more, 95% or more, 98% or more, or 100% amino acid sequence identity) to a contiguous stretch of from about 100 amino acids to about 110 amino acids (aa), from about 110 aa to about 115 aa, from about 115 aa to about 120 aa, from about 120 aa to about 130 aa, from about 130 aa to about 140 aa, from about 140 aa to about 150 aa, from about 150 aa to about 160 aa, from about 160 aa to about 170 aa, from about 170 aa to about 180 aa, from about 180 aa to about 190 aa, or from about 190 aa to about 200 aa of any of the following amino acid sequences:

GID1A:
(SEQ ID NO: 1585)
MAASDEVNLIESRTVVPLNTWVLISNFKVAYNILRRPDGTFNRHLAEYLD
RKVTANANPVDGVFSFDVLIDRRINLLSRVYRPAYADQEQPPSILDLEKP
VDGDIVPVILFFHGGSFAHSSANSAIYDTLCRRLVGLCKCVVVSVNYRRA
PENPYPCAYDDGWIALNWVNSRSWLKSKKDSKVHIFLAGDSSGGNIAHNV
ALRAGESGIDVLGNILLNPMFGGNERTESEKSLDGKYFVTVRDRDWYWKA
FLPEGEDREHPACNPFSPRGKSLEGVSFPKSLVVVAGLDLIRDWQLAYAE
GLKKAGQEVKLMHLEKATVGFYLLPNNNHFHNVMDEISAFVNAEC.
GID1B:
(SEQ ID NO: 1586)
MAGGNEVNLNECKRIVPLNTWVLISNFKLAYKVLRRPDGSFNRDLAEFLD
RKVPANSFPLDGVFSFDHVDSTTNLLTRIYQPASLLHQTRHGTLELTKPL
STTEIVPVLIFFHGGSFTHSSANSAIYDTFCRRLVTICGVVVVSVDYRRS
PEHRYPCAYDDGWNALNWVKSRVWLQSGKDSNVYVYLAGDSSGGNIAHNV
AVRATNEGVKVLGNILLHPMFGGQERTQSEKTLDGKYFVTIQDRDWYWRA
YLPEGEDRDHPACNPFGPRGQSLKGVNFPKSLVVVAGLDLVQDWQLAYVD
GLKKTGLEVNLLYLKQATIGFYFLPNNDHFHCLMEELNKFVHSIEDSQSK
SSPVLLTP
GID1C:
(SEQ ID NO: 1587)
MAGSEEVNLIESKTVVPLNTWVLISNFKLAYNLLRRPDGTFNRHLAEFLD
RKVPANANPVNGVFSFDVIIDRQTNLLSRVYRPADAGTSPSITDLQNPVD
GEIVPVIVFFHGGSFAHSSANSAIYDTLCRRLVGLCGAVVVSVNYRRAPE
NRYPCAYDDGWAVLKWVNSSSWLRSKKDSKVRIFLAGDSSGGNIVHNVAV
RAVESRIDVLGNILLNPMFGGTERTESEKRLDGKYFVTVRDRDWYWRAFL
PEGEDREHPACSPFGPRSKSLEGLSFPKSLVVVAGLDLIQDWQLKYAEGL
KKAGQEVKLLYLEQATIGFYLLPNNNHFHTVMDEIAAFVNAECQ.

[0521] Dimerizers

[0522] Dimerizers (“dimerizing agents”) that can provide for dimerization of a first member of a dimerizer-binding pair and a second member of a dimerizer-binding pair include, e.g. (where the dimerizer is in parentheses following the dimerizer-binding pair):

[0523] a) FKBP1A and FKBP1A (rapamycin and/or a rapamycin analog, rapalog);

[0524] b) FKBP1A and FRB (rapamycin and/or a rapamycin analog, rapalog);

[0525] c) FKBP1A and PPP3CA (rapamycin and/or a rapamycin analog, rapalog);

[0526] d) FKBP1A and cyclophilin (rapamycin and/or a rapamycin analog, rapalog);

[0527] e) GyrB and GyrB (coumermycin);

[0528] f) DHFR and DHFR (methotrexate);

[0529] g) DmrB and DmrB (AP20187);

[0530] h) PYL and ABI (abscisic acid);

[0531] i) Cry2 and CIB1 (blue light); and

[0532] j) GAI and GID1 (gibberellin).

[0533] As noted above, rapamycin can serve as a dimerizer. Alternatively, a rapamycin derivative or analog can be used. See, e.g., WO96/41865; WO 99/36553; WO 01/14387; and Ye et al (1999) Science 283:88-91. For example, analogs, homologs, derivatives and other compounds related structurally to rapamycin (“rapalogs”) include, among others, variants of rapamycin having one or more of the following modifications relative to rapamycin: demethylation, elimination or replacement of the methoxy at C7, C42 and/or C29; elimination, derivatization or replacement of the hydroxy at C13, C43 and/or C28; reduction, elimination or derivatization of the ketone at C14, C24 and/or C30; replacement of the 6-membered pipecolate ring with a 5-membered prolyl ring; and alternative substitution on the cyclohexyl ring or replacement of the cyclohexyl ring with a substituted cyclopentyl ring. Additional information is presented in, e.g., U.S. Pat. Nos. 5,525,610; 5,310,903 5,362,718; and 5,527,907. Selective epimerization of the C-28 hydroxyl group has been described; see, e.g., WO 01/14387. Additional synthetic dimerizing agents suitable for use as an alternative to rapamycin include those described in U.S. Patent Publication No. 2012/0130076.

[0534] Rapamycin has the structure:

[chemical structure]

[0535] Suitable rapalogs include, e.g.,

[chemical structure]

[0536] Also suitable as a rapalog is a compound of the formula:

[chemical structure]

[0537] where n is 1 or 2; R²⁸ and R⁴³ are independently H, or a substituted or unsubstituted aliphatic or acyl moiety; one of R^{7a} and R^{7b} is H and the other is halo, R^{A}, OR^{A}, SR^{A}, —OC(O)R^{A}, —OC(O)NR^{A}R^{B}, —NR^{A}R^{B}, —NR^{B}C(OR)R^{A}, NR^{B}C(O)OR^{A}, —NR^{B}SO₂R^{A}, or NR^{B}SO₂NR^{A}R^{B′}; or R^{7a} and R^{7b}, taken together, are H in the tetraene moiety:

[chemical structure]

[0538] where R^{A} is H or a substituted or unsubstituted aliphatic, heteroaliphatic, aryl, or heteroaryl moiety and where R^{B} and R^{B′} are independently H, OH, or a substituted or unsubstituted aliphatic, heteroaliphatic, aryl, or heteroaryl moiety.

[0539] As noted above, coumermycin can serve as a dimerizing agent. Alternatively, a coumermycin analog can be used. See, e.g., Farrar et al. (1996) Nature 383:178-181; and U.S. Pat. No. 6,916,846.

[0540] As noted above, in some cases, the dimerizing agent is methotrexate, e.g., a non-cytotoxic, homo-bifunctional methotrexate dimer. See, e.g., U.S. Pat. No. 8,236,925.

[0541] Examples of Cas9 Heterodimers

[0542] In some embodiments, a Cas9 heterodimer comprises: A) a first fusion polypeptide comprising: a) a first polypeptide comprising: i) a RuvCI polypeptide; ii) a RuvCII polypeptide; iii) an HNH polypeptide; iv) a RuvCIII polypeptide; and v) a PAM-interacting polypeptide; and b) a first fusion partner, where the first fusion partner is a first member of a dimerization pair; and B) a second fusion polypeptide comprising: a) an alpha-helical recognition region; and b) a second fusion partner, where the second fusion partner is a second member of a dimerization pair.

[0543] In some embodiments, a Cas9 heterodimer comprises: A) a first fusion polypeptide comprising: a) a first polypeptide comprising: i) a RuvCI polypeptide; ii) a RuvCII polypeptide; iii) an HNH polypeptide; iv) a RuvCIII polypeptide; and v) a PAM-interacting polypeptide; and b) a first fusion partner, where the first fusion partner is an FKBP1A polypeptide; and B) a second fusion polypeptide comprising: a) an alpha-helical recognition region; and b) a second fusion partner, where the second fusion partner is an FKBP1A polypeptide.

[0544] In some embodiments, a Cas9 heterodimer comprises: A) a first fusion polypeptide comprising: a) a first polypeptide comprising: i) a RuvCI polypeptide; ii) a RuvCII polypeptide; iii) an HNH polypeptide; iv) a RuvCIII polypeptide; and v) a PAM-interacting polypeptide; and b) a first fusion partner, where the first fusion partner is an FKBP1A polypeptide; and B) a second fusion polypeptide comprising: a) an alpha-helical recognition region; and b) a second fusion partner, where the second fusion partner is an FRB polypeptide. In some embodiments, a Cas9 heterodimer comprises: A) a first fusion polypeptide comprising: a) a first polypeptide comprising: i) a RuvCI polypeptide; ii) a RuvCII polypeptide; iii) an HNH polypeptide; iv) a RuvCIII polypeptide; and v) a PAM-interacting polypeptide; and b) a first fusion partner, where the first fusion partner is an FRB polypeptide; and B) a second fusion polypeptide comprising: a) an alpha-helical recognition region; and b) a second fusion partner, where the second fusion partner is an FKBP1A polypeptide.

[0545] In some embodiments, a Cas9 heterodimer comprises: A) a first fusion polypeptide comprising: a) a first polypeptide comprising: i) a RuvCI polypeptide; ii) a RuvCII polypeptide; iii) an HNH polypeptide; iv) a RuvCIII polypeptide; and v) a PAM-interacting polypeptide; and b) a first fusion partner, where the first fusion partner is an FKBP1A polypeptide; and B) a second fusion polypeptide comprising: a) an alpha-helical recognition region; and b) a second fusion partner, where the second fusion partner is a PPP3CA polypeptide. In some embodiments, a Cas9 heterodimer comprises: A) a first fusion polypeptide comprising: a) a first polypeptide comprising: i) a RuvCI polypeptide; ii) a RuvCII polypeptide; iii) an HNH polypeptide; iv) a RuvCIII polypeptide; and v) a PAM-interacting polypeptide; and b) a first fusion partner, where the first fusion partner is a PPP3CA polypeptide; and B) a second fusion polypeptide comprising: a) an alpha-helical recognition region; and b) a second fusion partner, where the second fusion partner is an FKBP1A polypeptide.

[0546] In some embodiments, a Cas9 heterodimer comprises: A) a first fusion polypeptide comprising: a) a first polypeptide comprising: i) a RuvCI polypeptide; ii) a RuvCII polypeptide; iii) an HNH polypeptide; iv) a RuvCIII polypeptide; and v) a PAM-interacting polypeptide; and b) a first fusion partner, where the first fusion partner is an FKBP1A polypeptide; and B) a second fusion polypeptide comprising: a) an alpha-helical recognition region; and b) a second fusion partner, where the second fusion partner is a cyclophilin polypeptide. In some embodiments, a Cas9 heterodimer comprises: A) a first fusion polypeptide comprising: a) a first polypeptide comprising: i) a RuvCI polypeptide; ii) a RuvCII polypeptide; iii) an HNH polypeptide; iv) a RuvCIII polypeptide; and v) a PAM-interacting polypeptide; and b) a first fusion partner, where the first fusion partner is a cyclophilin polypeptide; and B) a second fusion polypeptide comprising: a) an alpha-helical recognition region; and b) a second fusion partner, where the second fusion partner is an FKBP1A polypeptide.

[0547] In some embodiments, a Cas9 heterodimer comprises: A) a first fusion polypeptide comprising: a) a first polypeptide comprising: i) a RuvCI polypeptide; ii) a RuvCII polypeptide; iii) an HNH polypeptide; iv) a RuvCIII polypeptide; and v) a PAM-interacting polypeptide; and b) a first fusion partner, where the first fusion partner is a GyrB polypeptide; and B) a second fusion polypeptide comprising: a) an alpha-helical recognition region; and b) a second fusion partner, where the second fusion partner is a GyrB polypeptide.

[0548] In some embodiments, a Cas9 heterodimer comprises: A) a first fusion polypeptide comprising: a) a first polypeptide comprising: i) a RuvCI polypeptide; ii) a RuvCII polypeptide; iii) an HNH polypeptide; iv) a RuvCIII polypeptide; and v) a PAM-interacting polypeptide; and b) a first fusion partner, where the first fusion partner is a DHFR polypeptide; and B) a second fusion polypeptide comprising: a) an alpha-helical recognition region; and b) a second fusion partner, where the second fusion partner is a DHFR polypeptide.

[0549] In some embodiments, a Cas9 heterodimer comprises: A) a first fusion polypeptide comprising: a) a first polypeptide comprising: i) a RuvCI polypeptide; ii) a RuvCII polypeptide; iii) an HNH polypeptide; iv) a RuvCIII polypeptide; and v) a PAM-interacting polypeptide; and b) a first fusion partner, where the first fusion partner is a DmrB polypeptide; and B) a second fusion polypeptide comprising: a) an alpha-helical recognition region; and b) a second fusion partner, where the second fusion partner is a DmrB polypeptide.

[0550] In some embodiments, a Cas9 heterodimer comprises: A) a first fusion polypeptide comprising: a) a first polypeptide comprising: i) a RuvCI polypeptide; ii) a RuvCII polypeptide; iii) an HNH polypeptide; iv) a RuvCIII polypeptide; and v) a PAM-interacting polypeptide; and b) a first fusion partner, where the first fusion partner is a PYL polypeptide; and B) a second fusion polypeptide comprising: a) an alpha-helical recognition region; and b) a second fusion partner, where the second fusion partner is an ABI polypeptide. In some embodiments, a Cas9 heterodimer comprises: A) a first fusion polypeptide comprising: a) a first polypeptide comprising: i) a RuvCI polypeptide; ii) a RuvCII polypeptide; iii) an HNH polypeptide; iv) a RuvCIII polypeptide; and v) a PAM-interacting polypeptide; and b) a first fusion partner, where the first fusion partner is an ABI polypeptide; and B) a second fusion polypeptide comprising: a) an alpha-helical recognition region; and b) a second fusion partner, where the second fusion partner is an PYL polypeptide.

[0551] In some embodiments, a Cas9 heterodimer comprises: A) a first fusion polypeptide comprising: a) a first polypeptide comprising: i) a RuvCI polypeptide; ii) a RuvCII polypeptide; iii) an HNH polypeptide; iv) a RuvCIII polypeptide; and v) a PAM-interacting polypeptide; and b) a first fusion partner, where the first fusion partner is a Cyr2 polypeptide; and B) a second fusion polypeptide comprising: a) an alpha-helical recognition region; and b) a second fusion partner, where the second fusion partner is a CIB1 polypeptide. In some embodiments, a Cas9 heterodimer comprises: A) a first fusion polypeptide comprising: a) a first polypeptide comprising: i) a RuvCI polypeptide; ii) a RuvCII polypeptide; iii) an HNH polypeptide; iv) a RuvCIII polypeptide; and v) a PAM-interacting polypeptide; and b) a first fusion partner, where the first fusion partner is a CIB1 polypeptide; and B) a second fusion polypeptide comprising: a) an alpha-helical recognition region; and b) a second fusion partner, where the second fusion partner is an Cry2 polypeptide.

[0552] In some embodiments, a Cas9 heterodimer comprises: A) a first fusion polypeptide comprising: a) a first polypeptide comprising: i) a RuvCI polypeptide; ii) a RuvCII polypeptide; iii) an HNH polypeptide; iv) a RuvCIII polypeptide; and v) a PAM-interacting polypeptide; and b) a first fusion partner, where the first fusion partner is a GAI polypeptide; and B) a second fusion polypeptide comprising: a) an alpha-helical recognition region; and b) a second fusion partner, where the second fusion partner is a GID1 polypeptide. In some embodiments, a Cas9 heterodimer comprises: A) a first fusion polypeptide comprising: a) a first polypeptide comprising: i) a RuvCI polypeptide; ii) a RuvCII polypeptide; iii) an HNH polypeptide; iv) a RuvCIII polypeptide; and v) a PAM-interacting polypeptide; and b) a first fusion partner, where the first fusion partner is a GID1 polypeptide; and B) a second fusion polypeptide comprising: a) an alpha-helical recognition region; and b) a second fusion partner, where the second fusion partner is an GAI polypeptide.

[0553] In some cases, a Cas9 heterodimer comprises: A) a first fusion polypeptide comprising: a) a first, circular permuted, polypeptide that comprises: i) a RuvCI polypeptide; ii) a RuvCII polypeptide; iii) an HNH polypeptide; iv) a RuvCIII polypeptide; and v) a PAM-interacting polypeptide; and b) a first fusion partner, where the first fusion partner is a first member of a dimerization pair; and B) a second fusion polypeptide comprising: a) a second polypeptide that comprises an alpha-helical recognition region; and b) a second fusion partner, where the second fusion partner is a second member of the dimerization pair.

[0554] In some cases, a Cas9 heterodimer comprises: A) a first fusion polypeptide comprising: a) a first, circular permuted, polypeptide that comprises: i) a RuvCI polypeptide; ii) a RuvCII polypeptide; iii) an HNH polypeptide; iv) a RuvCIII polypeptide; and v) a PAM-interacting polypeptide; and b) a first fusion partner, where the first fusion partner is an FKBP1A polypeptide; and B) a second fusion polypeptide comprising: a) a second polypeptide that comprises an alpha-helical recognition region; and b) a second fusion partner, where the second fusion partner is an FKBP1A polypeptide.

[0555] In some cases, a Cas9 heterodimer comprises: A) a first fusion polypeptide comprising: a) a first, circular permuted, polypeptide that comprises: i) a RuvCI polypeptide; ii) a RuvCII polypeptide; iii) an HNH polypeptide; iv) a RuvCIII polypeptide; and v) a PAM-interacting polypeptide; and b) a first fusion partner, where the first fusion partner is an FKBP1A polypeptide; and B) a second fusion polypeptide comprising: a) a second polypeptide that comprises an alpha-helical recognition region; and b) a second fusion partner, where the second fusion partner is an FRB polypeptide. In some cases, a Cas9 heterodimer comprises: A) a first fusion polypeptide comprising: a) a first, circular permuted, polypeptide that comprises: i) a RuvCI polypeptide; ii) a RuvCII polypeptide; iii) an HNH polypeptide; iv) a RuvCIII polypeptide; and v) a PAM-interacting polypeptide; and b) a first fusion partner, where the first fusion partner is an FRB polypeptide; and B) a second fusion polypeptide comprising: a) a second polypeptide that comprises an alpha-helical recognition region; and b) a second fusion partner, where the second fusion partner is an FKBP1A polypeptide.

[0556] In some cases, a Cas9 heterodimer comprises: A) a first fusion polypeptide comprising: a) a first, circular permuted, polypeptide that comprises: i) a RuvCI polypeptide; ii) a RuvCII polypeptide; iii) an HNH polypeptide; iv) a RuvCIII polypeptide; and v) a PAM-interacting polypeptide; and b) a first fusion partner, where the first fusion partner is an FKBP1A polypeptide; and B) a second fusion polypeptide comprising: a) a second polypeptide that comprises an alpha-helical recognition region; and b) a second fusion partner, where the second fusion partner is a PPP3CA polypeptide. In some cases, a Cas9 heterodimer comprises: A) a first fusion polypeptide comprising: a) a first, circular permuted, polypeptide that comprises: i) a RuvCI polypeptide; ii) a RuvCII polypeptide; iii) an HNH polypeptide; iv) a RuvCIII polypeptide; and v) a PAM-interacting polypeptide; and b) a first fusion partner, where the first fusion partner is a PPP3CA polypeptide; and B) a second fusion polypeptide comprising: a) a second polypeptide that comprises an alpha-helical recognition region; and b) a second fusion partner, where the second fusion partner is an FKBP1A polypeptide.

[0557] In some cases, a Cas9 heterodimer comprises: A) a first fusion polypeptide comprising: a) a first, circular permuted, polypeptide that comprises: i) a RuvCI polypeptide; ii) a RuvCII polypeptide; iii) an HNH polypeptide; iv) a RuvCIII polypeptide; and v) a PAM-interacting polypeptide; and b) a first fusion partner, where the first fusion partner is an FKBP1A polypeptide; and B) a second fusion polypeptide comprising: a) a second polypeptide that comprises an alpha-helical recognition region; and b) a second fusion partner, where the second fusion partner is a cyclophilin polypeptide. In some cases, a Cas9 heterodimer comprises: A) a first fusion polypeptide comprising: a) a first, circular permuted, polypeptide that comprises: i) a RuvCI polypeptide; ii) a RuvCII polypeptide; iii) an HNH polypeptide; iv) a RuvCIII polypeptide; and v) a PAM-interacting polypeptide; and b) a first fusion partner, where the first fusion partner is a cyclophilin polypeptide; and B) a second fusion polypeptide comprising: a) a second polypeptide that comprises an alpha-helical recognition region; and b) a second fusion partner, where the second fusion partner is an FKBP1A polypeptide.

[0558] In some cases, a Cas9 heterodimer comprises: A) a first fusion polypeptide comprising: a) a first, circular permuted, polypeptide that comprises: i) a RuvCI polypeptide; ii) a RuvCII polypeptide; iii) an HNH polypeptide; iv) a RuvCIII polypeptide; and v) a PAM-interacting polypeptide; and b) a first fusion partner, where the first fusion partner is a GyrB polypeptide; and B) a second fusion polypeptide comprising: a) a second polypeptide that comprises an alpha-helical recognition region; and b) a second fusion partner, where the second fusion partner is a GyrB polypeptide.

[0559] In some cases, a Cas9 heterodimer comprises: A) a first fusion polypeptide comprising: a) a first, circular permuted, polypeptide that comprises: i) a RuvCI polypeptide; ii) a RuvCII polypeptide; iii) an HNH polypeptide; iv) a RuvCIII polypeptide; and v) a PAM-interacting polypeptide; and b) a first fusion partner, where the first fusion partner is a DHFR polypeptide; and B) a second fusion polypeptide comprising: a) a second polypeptide that comprises an alpha-helical recognition region; and b) a second fusion partner, where the second fusion partner is a DHFR polypeptide.

[0560] In some cases, a Cas9 heterodimer comprises: A) a first fusion polypeptide comprising: a) a first, circular permuted, polypeptide that comprises: i) a RuvCI polypeptide; ii) a RuvCII polypeptide; iii) an HNH polypeptide; iv) a RuvCIII polypeptide; and v) a PAM-interacting polypeptide; and b) a first fusion partner, where the first fusion partner is a DmrB polypeptide; and B) a second fusion polypeptide comprising: a) a second polypeptide that comprises an alpha-helical recognition region; and b) a second fusion partner, where the second fusion partner is a DmrB polypeptide.

[0561] In some cases, a Cas9 heterodimer comprises: A) a first fusion polypeptide comprising: a) a first, circular permuted, polypeptide that comprises: i) a RuvCI polypeptide; ii) a RuvCII polypeptide; iii) an HNH polypeptide; iv) a RuvCIII polypeptide; and v) a PAM-interacting polypeptide; and b) a first fusion partner, where the first fusion partner is a PYL polypeptide; and B) a second fusion polypeptide comprising: a) a second polypeptide that comprises an alpha-helical recognition region; and b) a second fusion partner, where the second fusion partner is an ABI polypeptide. In some cases, a Cas9 heterodimer comprises: A) a first fusion polypeptide comprising: a) a first, circular permuted, polypeptide that comprises: i) a RuvCI polypeptide; ii) a RuvCII polypeptide; iii) an HNH polypeptide; iv) a RuvCIII polypeptide; and v) a PAM-interacting polypeptide; and b) a first fusion partner, where the first fusion partner is an ABI polypeptide; and B) a second fusion polypeptide comprising: a) a second polypeptide that comprises an alpha-helical recognition region; and b) a second fusion partner, where the second fusion partner is a PYL polypeptide.

[0562] In some cases, a Cas9 heterodimer comprises: A) a first fusion polypeptide comprising: a) a first, circular permuted, polypeptide that comprises: i) a RuvCI polypeptide; ii) a RuvCII polypeptide; iii) an HNH polypeptide; iv) a RuvCIII polypeptide; and v) a PAM-interacting polypeptide; and b) a first fusion partner, where the first fusion partner is a Cry2 polypeptide; and B) a second fusion polypeptide comprising: a) a second polypeptide that comprises an alpha-helical recognition region; and b) a second fusion partner, where the second fusion partner is a CIB1 polypeptide. In some cases, a Cas9 heterodimer comprises: A) a first fusion polypeptide comprising: a) a first, circular permuted, polypeptide that comprises: i) a RuvCI polypeptide; ii) a RuvCII polypeptide; iii) an HNH polypeptide; iv) a RuvCIII polypeptide; and v) a PAM-interacting polypeptide; and b) a first fusion partner, where the first fusion partner is a CIB1 polypeptide; and B) a second fusion polypeptide comprising: a) a second polypeptide that comprises an alpha-helical recognition region; and b) a second fusion partner, where the second fusion partner is a Cry2 polypeptide.

[0563] In some cases, a Cas9 heterodimer comprises: A) a first fusion polypeptide comprising: a) a first, circular permuted, polypeptide that comprises: i) a RuvCI polypeptide; ii) a RuvCII polypeptide; iii) an HNH polypeptide; iv) a RuvCIII polypeptide; and v) a PAM-interacting polypeptide; and b) a first fusion partner, where the first fusion partner is a GAI polypeptide; and B) a second fusion polypeptide comprising: a) a second polypeptide that comprises an alpha-helical recognition region; and b) a second fusion partner, where the second fusion partner is a GID1 polypeptide. In some cases, a Cas9 heterodimer comprises: A) a first fusion polypeptide comprising: a) a first, circular permuted, polypeptide that comprises: i) a RuvCI polypeptide; ii) a RuvCII polypeptide; iii) an HNH polypeptide; iv) a RuvCIII polypeptide; and v) a PAM-interacting polypeptide; and b) a first fusion partner, where the first fusion partner is a GID1 polypeptide; and B) a second fusion polypeptide comprising: a) a second polypeptide that comprises an alpha-helical recognition region; and b) a second fusion partner, where the second fusion partner is a GAI polypeptide.

[0564] Chimeric Polypeptides (Fusion Polypeptides)

[0565] In some embodiments, a variant Cas9 protein is a chimeric Cas9 protein (also referred to herein as a fusion protein, e.g., a “Cas9 fusion protein”). A Cas9 fusion protein can bind and/or modify a target nucleic acid (e.g., cleave, methylate, demethylate, etc.) and/or a polypeptide associated with target nucleic acid (e.g., methylation, acetylation, etc., of, for example, a histone tail).

[0566] A Cas9 fusion protein is a variant Cas9 protein, e.g., by virtue of differing in sequence from a wild type Cas9 protein. A Cas9 fusion protein is a Cas9 protein (e.g., a wild type Cas9 protein, a variant Cas9 protein, a Cas9 heterodimer, a variant Cas9 protein with reduced nuclease activity (as described above), and the like) fused to a covalently linked heterologous polypeptide (also referred to as a “fusion partner”). In some cases, a Cas9 fusion protein is a variant Cas9 protein with reduced nuclease activity (e.g., dCas9, a nickase with a functional RuvC domain but a non-functional HNH domain such that it can cleave a quenched PAMmer but does not cleave the target nucleic acid) fused to a covalently linked heterologous protein. In some cases, the heterologous protein exhibits (and therefore provides for) an activity (e.g., an enzymatic activity) that will also be exhibited by the Cas9 fusion protein (e.g., methyltransferase activity, acetyltransferase activity, kinase activity, ubiquitinating activity, etc.). In some such cases, a method of labeling, e.g., where the Cas9 protein is a variant Cas9 protein having a fusion partner (i.e., having a heterologous protein) with an activity (e.g., an enzymatic activity) that modifies the target nucleic acid, the method can also be considered to be a method of modifying the target nucleic acid. In some cases, a method of labeling a target nucleic acid (e.g., a single stranded target nucleic acid) can result in modification of the target nucleic acid. Thus, in some cases, a method of labeling a target nucleic acid (e.g., a single stranded target nucleic acid) can be a method of modifying the target nucleic acid.

[0567] In some cases, the heterologous sequence provides for subcellular localization, i.e., the heterologous sequence is a subcellular localization sequence (e.g., a nuclear localization signal (NLS) for targeting to the nucleus, a sequence to keep the fusion protein out of the nucleus, e.g., a nuclear export sequence (NES), a sequence to keep the fusion protein retained in the cytoplasm, a mitochondrial localization signal for targeting to the mitochondria, a chloroplast localization signal for targeting to a chloroplast, an ER retention signal, and the like). In some embodiments, a variant Cas9 does not include a NLS so that the protein is not targeted to the nucleus (which can be advantageous, e.g., when the target nucleic acid is an RNA that is present in the cytosol). In some embodiments, the heterologous sequence can provide a tag (i.e., the heterologous sequence is a detectable label) for ease of tracking and/or purification (e.g., a fluorescent protein, e.g., green fluorescent protein (GFP), YFP, RFP, CFP, mCherry, tdTomato, and the like; a histidine tag, e.g., a 6× His tag; a hemagglutinin (HA) tag; a FLAG tag; a Myc tag; and the like). In some embodiments, the heterologous sequence can provide for increased or decreased stability (i.e., the heterologous sequence is a stability control peptide, e.g., a degron, which in some cases is controllable (e.g., a temperature sensitive or drug controllable degron sequence, see below). In some embodiments, the heterologous sequence can provide for increased or decreased transcription from the target nucleic acid (i.e., the heterologous sequence is a transcription modulation sequence, e.g., a transcription factor/activator or a fragment thereof, a protein or fragment thereof that recruits a transcription factor/activator, a transcription repressor or a fragment thereof, a protein or fragment thereof that recruits a transcription repressor, a small molecule/drug-responsive transcription regulator, etc.). In some embodiments, the heterologous sequence can provide a binding domain (i.e., the heterologous sequence is a protein binding sequence, e.g., to provide the ability of a Cas9 fusion polypeptide to bind to another protein of interest, e.g., a DNA or histone modifying protein, a transcription factor or transcription repressor, a recruiting protein, an RNA modification enzyme, an RNA-binding protein, a translation initiation factor, an RNA splicing factor, etc.). A heterologous nucleic acid sequence may be linked to another nucleic acid sequence (e.g., by genetic engineering) to generate a chimeric nucleotide sequence encoding a chimeric polypeptide.

[0568] A subject Cas9 fusion polypeptide (Cas9 fusion protein) can have multiple (1 or more, 2 or more, 3 or more, 4 or more, 5 or more, 6 or more, etc.) fusion partners in any combination of the above. As an illustrative example, a Cas9 fusion protein can have a heterologous sequence that provides an activity (e.g., for transcription modulation, target modification, modification of a protein associated with a target nucleic acid, etc.) and can also have a subcellular localization sequence (e.g,. 1 or more NLSs). In some cases, such a Cas9 fusion protein might also have a tag for ease of tracking and/or purification (e.g., green fluorescent protein (GFP), YFP, RFP, CFP, mCherry, tdTomato, and the like; a histidine tag, e.g., a 6× His tag; a hemagglutinin (HA) tag; a FLAG tag; a Myc tag; and the like). As another illustrative example, a Cas9 protein can have one or more NLSs (e.g., two or more, three or more, four or more, five or more, 1, 2, 3, 4, or 5 NLSs). In some cases a fusion partner (or multiple fusion partners) (e.g., an NLS, a tag, a fusion partner providing an activity, etc.) is located at or near the C-terminus of Cas9. In some cases a fusion partner (or multiple fusion partners) (e.g., an NLS, a tag, a fusion partner providing an activity, etc.) is located at the N-terminus of Cas9. In some cases a Cas9 has a fusion partner (or multiple fusion partners) (e.g., an NLS, a tag, a fusion partner providing an activity, etc.) at both the N-terminus and C-terminus.

[0569] Suitable fusion partners that provide for increased or decreased stability include, but are not limited to degron sequences. Degrons are readily understood by one of ordinary skill in the art to be amino acid sequences that control the stability of the protein of which they are part. For example, the stability of a protein comprising a degron sequence is controlled in part by the degron sequence. In some cases, a suitable degron is constitutive such that the degron exerts its influence on protein stability independent of experimental control (i.e., the degron is not drug inducible, temperature inducible, etc.) In some cases, the degron provides the variant Cas9 protein with controllable stability such that the variant Cas9 protein can be turned “on” (i.e., stable) or “off” (i.e., unstable, degraded) depending on the desired conditions. For example, if the degron is a temperature sensitive degron, the variant Cas9 protein may be functional (i.e., “on”, stable) below a threshold temperature (e.g., 42° C., 41° C., 40° C., 39° C., 38° C., 37° C., 36° C., 35° C., 34° C., 33° C., 32° C., 31° C., 30° C., etc.) but non-functional (i.e., “off”, degraded) above the threshold temperature. As another example, if the degron is a drug inducible degron, the presence or absence of drug can switch the protein from an “off” (i.e., unstable) state to an “on” (i.e., stable) state or vice versa. An exemplary drug inducible degron is derived from the FKBP12 protein. The stability of the degron is controlled by the presence or absence of a small molecule that binds to the degron.

[0570] Examples of suitable degrons include, but are not limited to those degrons controlled by Shield-1, DHFR, auxins, and/or temperature. Non-limiting examples of suitable degrons are known in the art (e.g., Dohmen et al., Science, 1994. 263(5151): p. 1273-1276: Heat-inducible degron: a method for constructing temperature-sensitive mutants; Schoeber et al., Am J Physiol Renal Physiol. 2009 January; 296(1):F204-11: Conditional fast expression and function of multimeric TRPV5 channels using Shield-1; Chu et al., Bioorg Med Chem Lett. 2008 Nov. 15; 18(22):5941-4: Recent progress with FKBP-derived destabilizing domains; Kanemaki, Pflugers Arch. 2012 Dec. 28: Frontiers of protein expression control with conditional degrons; Yang et al., Mol Cell. 2012 Nov. 30; 48(4):487-8: Titivated for destruction: the methyl degron; Barbour et al., Biosci Rep. 2013 Jan. 18; 33(1): Characterization of the bipartite degron that regulates ubiquitin-independent degradation of thymidylate synthase; and Greussing et al., J Vis Exp. 2012 Nov. 10; (69): Monitoring of ubiquitin-proteasome activity in living cells using a Degron (dgn)-destabilized green fluorescent protein (GFP)-based reporter protein; all of which are hereby incorporated in their entirety by reference).

[0571] Exemplary degron sequences have been well-characterized and tested in both cells and animals. Thus, fusing Cas9 (e.g., wild type Cas9; variant Cas9; variant Cas9 with reduced nuclease activity, e.g., dCas9; and the like) to a degron sequence produces a “tunable” and “inducible” Cas9 protein. Any of the fusion partners described herein can be used in any desirable combination. As one non-limiting example to illustrate this point, a Cas9 fusion protein (i.e., a chimeric Cas9 protein) can comprise a YFP sequence for detection, a degron sequence for stability, and transcription activator sequence to increase transcription of the target nucleic acid. A suitable reporter protein for use as a fusion partner for a Cas9 protein (e.g., wild type Cas9, variant Cas9, variant Cas9 with reduced nuclease function, etc.), includes, but is not limited to, the following exemplary proteins (or functional fragment thereof): his3, β-galatosidase, a fluorescent protein (e.g., GFP, RFP, YFP, cherry, tomato, etc., and various derivatives thereof), luciferase, β-glucuronidase, and alkaline phosphatase. Furthermore, the number of fusion partners that can be used in a Cas9 fusion protein is unlimited. In some cases, a Cas9 fusion protein comprises one or more (e.g. two or more, three or more, four or more, or five or more) heterologous sequences.

[0572] Suitable fusion partners include, but are not limited to, a polypeptide that provides for methyltransferase activity, demethylase activity, acetyltransferase activity, deacetylase activity, kinase activity, phosphatase activity, ubiquitin ligase activity, deubiquitinating activity, adenylation activity, deadenylation activity, SUMOylating activity, deSUMOylating activity, ribosylation activity, deribosylation activity, myristoylation activity, or demyristoylation activity, any of which can be directed at modifying nucleic acid directly (e.g., methylation of DNA or RNA) or at modifying a nucleic acid-associated polypeptide (e.g., a histone, a DNA binding protein, and RNA binding protein, and the like). Further suitable fusion partners include, but are not limited to boundary elements (e.g., CTCF), proteins and fragments thereof that provide periphery recruitment (e.g., Lamin A, Lamin B, etc.), and protein docking elements (e.g., FKBP/FRB, Pil1/Aby1, etc.).

[0573] Examples of various additional suitable fusion partners (or fragments thereof) for a subject variant Cas9 protein include, but are not limited to those listed in FIG. 15 and are also described in the PCT patent applications: WO2010075303, WO2012068627, and WO2013155555 which are hereby incorporated by reference in their entirety.

[0574] Suitable fusion partners include, but are not limited to, a polypeptide that provides an activity that indirectly increases transcription by acting directly on the target nucleic acid or on a polypeptide (e.g., a histone, a DNA-binding protein, an RNA-binding protein, an RNA editing protein, etc.) associated with the target nucleic acid. Suitable fusion partners include, but are not limited to, a polypeptide that provides for methyltransferase activity, demethylase activity, acetyltransferase activity, deacetylase activity, kinase activity, phosphatase activity, ubiquitin ligase activity, deubiquitinating activity, adenylation activity, deadenylation activity, SUMOylating activity, deSUMOylating activity, ribosylation activity, deribosylation activity, myristoylation activity, or demyristoylation activity.

[0575] Additional suitable fusion partners include, but are not limited to, a polypeptide that directly provides for increased transcription and/or translation of a target nucleic acid (e.g., a transcription activator or a fragment thereof, a protein or fragment thereof that recruits a transcription activator, a small molecule/drug-responsive transcription and/or translation regulator, a translation-regulating protein, etc.).

[0576] Non-limiting examples of fusion partners to accomplish increased or decreased transcription are listed in FIG. 15B-D and include transcription activator and transcription repressor domains (e.g., the Krüppel associated box (KRAB or SKD); the Mad mSIN3 interaction domain (SID); the ERF repressor domain (ERD), etc). In some such cases, a Cas9 fusion protein is targeted by the Cas9 guide RNA to a specific location (i.e., sequence) in the target nucleic acid and exerts locus-specific regulation such as blocking RNA polymerase binding to a promoter (which selectively inhibits transcription activator function), and/or modifying the local chromatin status (e.g., when a fusion sequence is used that modifies the target nucleic acid or modifies a polypeptide associated with the target nucleic acid). In some cases, the changes are transient (e.g., transcription repression or activation). In some cases, the changes are inheritable (e.g., when epigenetic modifications are made to the target nucleic acid or to proteins associated with the target nucleic acid, e.g., nucleosomal histones).

[0577] Non-limiting examples of fusion partners for use when targeting ssRNA target nucleic acids are listed in FIG. 15A and include (but are not limited to): splicing factors (e.g., RS domains); protein translation components (e.g., translation initiation, elongation, and/or release factors; e.g., eIF4G); RNA methylases; RNA editing enzymes (e.g., RNA deaminases, e.g., adenosine deaminase acting on RNA (ADAR), including A to I and/or C to U editing enzymes); helicases; RNA-binding proteins; and the like. It is understood that a fusion partner can include the entire protein or in some cases can include a fragment of the protein (e.g., a functional domain).

[0578] In some embodiments, the heterologous sequence can be fused to the C-terminus of the Cas9 protein. In some embodiments, the heterologous sequence can be fused to the N-terminus of the Cas9 protein. In some embodiments, the heterologous sequence can be fused to an internal portion (i.e., a portion other than the N- or C-terminus) of the Cas9 protein.

[0579] In addition to the fusion partners listed in FIG. 15A the fusion partner of a chimeric Cas9 protein can be any domain capable of interacting with ssRNA (which, for the purposes of this disclosure, includes intramolecular and/or intermolecular secondary structures, e.g., double-stranded RNA duplexes such as hairpins, stem-loops, etc.), whether transiently or irreversibly, directly or indirectly, including but not limited to an effector domain selected from the group comprising; Endonucleases (for example RNase III, the CRR22 DYW domain, Dicer, and PIN (PilT N-terminus) domains from proteins such as SMG5 and SMG6); proteins and protein domains responsible for stimulating RNA cleavage (for example CPSF, CstF, CFIm and CFIIm); Exonucleases (for example XRN-1 or Exonuclease T); Deadenylases (for example HNT3); proteins and protein domains responsible for nonsense mediated RNA decay (for example UPF1, UPF2, UPF3, UPF3b, RNP S1, Y14, DEK, REF2, and SRm160); proteins and protein domains responsible for stabilizing RNA (for example PABP); proteins and protein domains responsible for repressing translation (for example Ago2 and Ago4); proteins and protein domains responsible for stimulating translation (for example Staufen); proteins and protein domains responsible for (e.g., capable of) modulating translation (e.g., translation factors such as initiation factors, elongation factors, release factors, etc., e.g., eIF4G); proteins and protein domains responsible for polyadenylation of RNA (for example PAP1, GLD-2, and Star-PAP); proteins and protein domains responsible for polyuridinylation of RNA (for example CID1 and terminal uridylate transferase); proteins and protein domains responsible for RNA localization (for example from IMP1, ZBP1, She2p, She3p, and Bicaudal-D); proteins and protein domains responsible for nuclear retention of RNA (for example Rrp6); proteins and protein domains responsible for nuclear export of RNA (for example TAP, NXF1, THO, TREX, REF, and Aly); proteins and protein domains responsible for repression of RNA splicing (for example PTB, Sam68, and hnRNP A1); proteins and protein domains responsible for stimulation of RNA splicing (for example Serine/Arginine-rich (SR) domains); proteins and protein domains responsible for reducing the efficiency of transcription (for example FUS (TLS)); and proteins and protein domains responsible for stimulating transcription (for example CDK7 and HIV Tat). Alternatively, the effector domain may be selected from the group comprising Endonucleases; proteins and protein domains capable of stimulating RNA cleavage; Exonucleases; Deadenylases; proteins and protein domains having nonsense mediated RNA decay activity; proteins and protein domains capable of stabilizing RNA; proteins and protein domains capable of repressing translation; proteins and protein domains capable of stimulating translation; proteins and protein domains capable of modulating translation (e.g., translation factors such as initiation factors, elongation factors, release factors, etc., e.g., eIF4G); proteins and protein domains capable of polyadenylation of RNA; proteins and protein domains capable of polyuridinylation of RNA; proteins and protein domains having RNA localization activity; proteins and protein domains capable of nuclear retention of RNA; proteins and protein domains having RNA nuclear export activity; proteins and protein domains capable of repression of RNA splicing; proteins and protein domains capable of stimulation of RNA splicing; proteins and protein domains capable of reducing the efficiency of transcription; and proteins and protein domains capable of stimulating transcription. Another suitable fusion partner is a PUF RNA-binding domain, which is described in more detail in WO2012068627.

[0580] Some RNA splicing factors that can be used (in whole or as fragments thereof) as fusion partners for a Cas9 polypeptide have modular organization, with separate sequence-specific RNA binding modules and splicing effector domains. For example, members of the Serine/Arginine-rich (SR) protein family contain N-terminal RNA recognition motifs (RRMs) that bind to exonic splicing enhancers (ESEs) in pre-mRNAs and C-terminal RS domains that promote exon inclusion. As another example, the hnRNP protein hnRNP A1 binds to exonic splicing silencers (ESSs) through its RRM domains and inhibits exon inclusion through a C-terminal Glycine-rich domain. Some splicing factors can regulate alternative use of splice site (ss) by binding to regulatory sequences between the two alternative sites. For example, ASF/SF2 can recognize ESEs and promote the use of intron proximal sites, whereas hnRNP A1 can bind to ESSs and shift splicing towards the use of intron distal sites. One application for such factors is to generate ESFs that modulate alternative splicing of endogenous genes, particularly disease associated genes. For example, Bcl-x pre-mRNA produces two splicing isoforms with two alternative 5′ splice sites to encode proteins of opposite functions. The long splicing isoform Bcl-xL is a potent apoptosis inhibitor expressed in long-lived postmitotic cells and is up-regulated in many cancer cells, protecting cells against apoptotic signals. The short isoform Bcl-xS is a pro-apoptotic isoform and expressed at high levels in cells with a high turnover rate (e.g., developing lymphocytes). The ratio of the two Bcl-x splicing isoforms is regulated by multiple c\acute{ω}-elements that are located in either the core exon region or the exon extension region (i.e., between the two alternative 5′ splice sites). For more examples, see WO2010075303.

[0581] In some embodiments, a Cas9 protein (e.g., a wild type Cas9, a variant Cas9, a variant Cas9 with reduced nuclease activity, etc.) can be linked to a fusion partner via a peptide spacer.

[0582] Nucleic Acids Encoding a PAMmer and/or a Cas9 Guide RNA, and/or a Cas9 Protein

[0583] The present disclosure provides compositions and methods that include a PAMmer and at least one of: a Cas9 guide RNA, and a Cas9 protein (e.g., a wild type Cas9 protein, a variant Cas9 protein, a chimeric Cas9 protein, and the like). In some cases, a subject PAMmer, and/or Cas9 guide RNA, and/or a Cas9 protein is provided as a nucleic acid encoding one or more of a PAMmer and/or Cas9 guide RNA, and/or a Cas9 protein. In some embodiments, a subject nucleic acid is an expression vector, e.g., a recombinant expression vector. As such, In some embodiments, a subject method involves contacting a target nucleic acid (e.g., a single stranded target nucleic acid) or introducing into a cell (or a population of cells) a PAMmer (or a nucleic acid comprising a nucleotide sequence encoding a PAMmer) and at least one of: a Cas9 guide RNA (or a nucleic acid comprising a nucleotide sequence encoding a Cas9 guide RNA), and a Cas9 protein (or a nucleic acid comprising a nucleotide sequence encoding a Cas9 protein). In some embodiments a cell comprising a target nucleic acid is in vitro and/or ex vivo. In some embodiments a cell comprising a target nucleic acid is in vivo. Suitable nucleic acids comprising nucleotide sequences encoding a PAMmer, a Cas9 guide RNA, and/or a Cas9 protein include expression vectors, where an expression vector comprising a nucleotide sequence encoding a PAMmer and/or a Cas9 guide RNA and/or a Cas9 protein is a “recombinant expression vector.”

[0584] In some embodiments, the recombinant expression vector is a viral construct, e.g., a recombinant adeno-associated virus construct (see, e.g., U.S. Pat. No. 7,078,387), a recombinant adenoviral construct, a recombinant lentiviral construct, a recombinant retroviral construct, etc.

[0585] Suitable expression vectors include, but are not limited to, viral vectors (e.g. viral vectors based on vaccinia virus; poliovirus; adenovirus (see, e.g., Li et al., Invest Opthalmol Vis Sci 35:2543 2549, 1994; Borras et al., Gene Ther 6:515 524, 1999; Li and Davidson, PNAS 92:7700 7704, 1995; Sakamoto et al., H Gene Ther 5:1088 1097, 1999; WO 94/12649, WO 93/03769; WO 93/19191; WO 94/28938; WO 95/11984 and WO 95/00655); adeno-associated virus (see, e.g., Ali et al., Hum Gene Ther 9:81 86, 1998, Flannery et al., PNAS 94:6916 6921, 1997; Bennett et al., Invest Opthalmol Vis Sci 38:2857 2863, 1997; Jomary et al., Gene Ther 4:683 690, 1997, Rolling et al., Hum Gene Ther 10:641 648, 1999; Ali et al., Hum Mol Genet 5:591 594, 1996; Srivastava in WO 93/09239, Samulski et al., J. Vir. (1989) 63:3822-3828; Mendelson et al., Virol. (1988) 166:154-165; and Flotte et al., PNAS (1993) 90:10613-10617); SV40; herpes simplex virus; human immunodeficiency virus (see, e.g., Miyoshi et al., PNAS 94:10319 23, 1997; Takahashi et al., J Virol 73:7812 7816, 1999); a retroviral vector (e.g., Murine Leukemia Virus, spleen necrosis virus, and vectors derived from retroviruses such as Rous Sarcoma Virus, Harvey Sarcoma Virus, avian leukosis virus, a lentivirus, human immunodeficiency virus, myeloproliferative sarcoma virus, and mammary tumor virus); and the like.

[0586] Numerous suitable expression vectors are known to those of skill in the art, and many are commercially available. The following vectors are provided by way of example; for eukaryotic host cells: pXT1, pSG5 (Stratagene), pSVK3, pBPV, pMSG, and pSVLSV40 (Pharmacia). However, any other vector may be used so long as it is compatible with the host cell.

[0587] Depending on the host/vector system utilized, any of a number of suitable transcription and translation control elements, including constitutive and inducible promoters, transcription enhancer elements, transcription terminators, etc. may be used in the expression vector (see e.g., Bitter et al. (1987) Methods in Enzymology, 153:516-544).

[0588] In some embodiments, a nucleotide sequence encoding a PAMmer, and/or a Cas9 guide RNA and/or a Cas9 protein is operably linked to a control element, e.g., a transcriptional control element, such as a promoter. The transcriptional control element may be functional in either a eukaryotic cell, e.g., a mammalian cell; or a prokaryotic cell (e.g., bacterial or archaeal cell). In some embodiments, a nucleotide sequence encoding a PAMmer, and/or a Cas9 guide RNA and/or a Cas9 protein is operably linked to multiple control elements that allow expression of the nucleotide sequence encoding a PAMmer, and/or a Cas9 guide RNA and/or a Cas9 protein in both prokaryotic and eukaryotic cells.

[0589] Non-limiting examples of suitable eukaryotic promoters (promoters functional in a eukaryotic cell) include those from cytomegalovirus (CMV) immediate early, herpes simplex virus (HSV) thymidine kinase, early and late SV40, long terminal repeats (LTRs) from retrovirus, and mouse metallothionein-I. Selection of the appropriate vector and promoter is well within the level of ordinary skill in the art. The expression vector may also contain a ribosome binding site for translation initiation and a transcription terminator. The expression vector may also include appropriate sequences for amplifying expression. The expression vector may also include nucleotide sequences encoding protein tags (e.g., 6× His tag, hemagglutinin tag, green fluorescent protein, etc.) that are fused to the Cas9 protein, thus resulting in a chimeric polypeptide.

[0590] In some embodiments, a nucleotide sequence encoding a Cas9 guide RNA and/or a Cas9 protein is operably linked to an inducible promoter. In some embodiments, a nucleotide sequence encoding a Cas9 guide RNA and/or a Cas9 protein is operably linked to a constitutive promoter.

[0591] A promoter can be a constitutively active promoter (i.e., a promoter that is constitutively in an active/“ON” state), it may be an inducible promoter (i.e., a promoter whose state, active/“ON” or inactive/“OFF”, is controlled by an external stimulus, e.g., the presence of a particular temperature, compound, or protein.), it may be a spatially restricted promoter (i.e., transcriptional control element, enhancer, etc.) (e.g., tissue specific promoter, cell type specific promoter, etc.), and it may be a temporally restricted promoter (i.e., the promoter is in the “ON” state or “OFF” state during specific stages of embryonic development or during specific stages of a biological process, e.g., hair follicle cycle in mice).

[0592] Suitable promoters can be derived from viruses and can therefore be referred to as viral promoters, or they can be derived from any organism, including prokaryotic or eukaryotic organisms. Suitable promoters can be used to drive expression by any RNA polymerase (e.g., pol I, pol II, pol III). Exemplary promoters include, but are not limited to the SV40 early promoter, mouse mammary tumor virus long terminal repeat (LTR) promoter; adenovirus major late promoter (Ad MLP); a herpes simplex virus (HSV) promoter, a cytomegalovirus (CMV) promoter such as the CMV immediate early promoter region (CMVIE), a rous sarcoma virus (RSV) promoter, a human U6 small nuclear promoter (U6) (Miyagishi et al., Nature Biotechnology 20, 497-500 (2002)), an enhanced U6 promoter (e.g., Xia et al., Nucleic Acids Res. 2003 Sep. 1; 31(17)), a human H1 promoter (H1), and the like.

[0593] Examples of inducible promoters include, but are not limited to T7 RNA polymerase promoter, T3 RNA polymerase promoter, Isopropyl-beta-D-thiogalactopyranoside (IPTG)-regulated promoter, lactose induced promoter, heat shock promoter, Tetracycline-regulated promoter, Steroid-regulated promoter, Metal-regulated promoter, estrogen receptor-regulated promoter, etc. Inducible promoters can therefore be regulated by molecules including, but not limited to, doxycycline; RNA polymerase, e.g., T7 RNA polymerase; an estrogen receptor; an estrogen receptor fusion; etc.

[0594] In some embodiments, the promoter is a spatially restricted promoter (i.e., cell type specific promoter, tissue specific promoter, etc.) such that in a multi-cellular organism, the promoter is active (i.e., “ON”) in a subset of specific cells. Spatially restricted promoters may also be referred to as enhancers, transcriptional control elements, control sequences, etc. Any convenient spatially restricted promoter may be used and the choice of suitable promoter (e.g., a brain specific promoter, a promoter that drives expression in a subset of neurons, a promoter that drives expression in the germline, a promoter that drives expression in the lungs, a promoter that drives expression in muscles, a promoter that drives expression in islet cells of the pancreas, etc.) will depend on the organism. For example, various spatially restricted promoters are known for plants, flies, worms, mammals, mice, etc. Thus, a spatially restricted promoter can be used to regulate the expression of a nucleic acid encoding a Cas9 protein in a wide variety of different tissues and cell types, depending on the organism. Some spatially restricted promoters are also temporally restricted such that the promoter is in the “ON” state or “OFF” state during specific stages of embryonic development or during specific stages of a biological process (e.g., hair follicle cycle in mice).

[0595] For illustration purposes, examples of spatially restricted promoters include, but are not limited to, neuron-specific promoters, adipocyte-specific promoters, cardiomyocyte-specific promoters, smooth muscle-specific promoters, photoreceptor-specific promoters, etc. Neuron-specific spatially restricted promoters include, but are not limited to, a neuron-specific enolase (NSE) promoter (see, e.g., EMBL HSENO2, X51956); an aromatic amino acid decarboxylase (AADC) promoter; a neurofilament promoter (see, e.g., GenBank HUMNFL, L04147); a synapsin promoter (see, e.g., GenBank HUMSYNIB, M55301); a thy-1 promoter (see, e.g., Chen et al. (1987) Cell 51:7-19; and Llewellyn, et al. (2010) Nat. Med. 16(10):1161-1166); a serotonin receptor promoter (see, e.g., GenBank S62283); a tyrosine hydroxylase promoter (TH) (see, e.g., Oh et al. (2009) Gene Ther 16:437; Sasaoka et al. (1992) Mol. Brain Res. 16:274; Boundy et al. (1998) J. Neurosci. 18:9989; and Kaneda et al. (1991) Neuron 6:583-594); a GnRH promoter (see, e.g., Radovick et al. (1991) Proc. Natl. Acad. Sci. USA 88:3402-3406); an L7 promoter (see, e.g., Oberdick et al. (1990) Science 248:223-226); a DNMT promoter (see, e.g., Bartge et al. (1988) Proc. Natl. Acad. Sci. USA 85:3648-3652); an enkephalin promoter (see, e.g., Comb et al. (1988) EMBO J. 17:3793-3805); a myelin basic protein (MBP) promoter; a Ca2+-calmodulin-dependent protein kinase II-alpha (CamKIIα) promoter (see, e.g., Mayford et al. (1996) Proc. Natl. Acad. Sci. USA 93:13250; and Casanova et al. (2001) Genesis 31:37); a CMV enhancer/platelet-derived growth factor-β promoter (see, e.g., Liu et al. (2004) Gene Therapy 11:52-60); and the like.

[0596] Adipocyte-specific spatially restricted promoters include, but are not limited to aP2 gene promoter/enhancer, e.g., a region from −5.4 kb to +21 bp of a human aP2 gene (see, e.g., Tozzo et al. (1997) Endocrinol. 138:1604; Ross et al. (1990) Proc. Natl. Acad. Sci. USA 87:9590; and Pavjani et al. (2005) Nat. Med. 11:797); a glucose transporter-4 (GLUT4) promoter (see, e.g., Knight et al. (2003) Proc. Natl. Acad. Sci. USA 100:14725); a fatty acid translocase (FAT/CD36) promoter (see, e.g., Kuriki et al. (2002) Biol. Pharm. Bull. 25:1476; and Sato et al. (2002) J. Biol. Chem. 277:15703); a stearoyl-CoA desaturase-1 (SCD1) promoter (Tabor et al. (1999) J. Biol. Chem. 274:20603); a leptin promoter (see, e.g., Mason et al. (1998) Endocrinol. 139:1013; and Chen et al. (1999) Biochem. Biophys. Res. Comm 262:187); an adiponectin promoter (see, e.g., Kita et al. (2005) Biochem. Biophys. Res. Comm 331:484; and Chakrabarti (2010) Endocrinol. 151:2408); an adipsin promoter (see, e.g., Platt et al. (1989) Proc. Natl. Acad. Sci. USA 86:7490); a resistin promoter (see, e.g., Seo et al. (2003) Molec. Endocrinol. 17:1522); and the like.

[0597] Cardiomyocyte-specific spatially restricted promoters include, but are not limited to control sequences derived from the following genes: myosin light chain-2, α-myosin heavy chain, AE3, cardiac troponin C, cardiac actin, and the like. Franz et al. (1997) Cardiovasc. Res. 35:560-566; Robbins et al. (1995) Ann. N.Y. Acad. Sci. 752:492-505; Linn et al. (1995) Circ. Res. 76:584-591; Parmacek et al. (1994) Mol. Cell. Biol. 14:1870-1885; Hunter et al. (1993) Hypertension 22:608-617; and Sartorelli et al. (1992) Proc. Natl. Acad. Sci. USA 89:4047-4051.

[0598] Smooth muscle-specific spatially restricted promoters include, but are not limited to an SM22α promoter (see, e.g., Akyiirek et al. (2000) Mol. Med. 6:983; and U.S. Pat. No. 7,169,874); a smoothelin promoter (see, e.g., WO 2001/018048); an α-smooth muscle actin promoter; and the like. For example, a 0.4 kb region of the SM22α promoter, within which lie two CArG elements, has been shown to mediate vascular smooth muscle cell-specific expression (see, e.g., Kim, et al. (1997) Mol. Cell. Biol. 17, 2266-2278; Li, et al., (1996) J. Cell Biol. 132, 849-859; and Moessler, et al. (1996) Development 122, 2415-2425).

[0599] Photoreceptor-specific spatially restricted promoters include, but are not limited to, a rhodopsin promoter; a rhodopsin kinase promoter (Young et al. (2003) Ophthalmol. Vis. Sci. 44:4076); a beta phosphodiesterase gene promoter (Nicoud et al. (2007) J. Gene Med. 9:1015); a retinitis pigmentosa gene promoter (Nicoud et al. (2007) supra); an interphotoreceptor retinoid-binding protein (IRBP) gene enhancer (Nicoud et al. (2007) supra); an IRBP gene promoter (Yokoyama et al. (1992) Exp Eye Res. 55:225); and the like.

[0600] Methods of introducing a nucleic acid into a host cell are known in the art, and any known method can be used to introduce a nucleic acid (e.g., an expression construct) into a cell. Suitable methods include e.g., viral or bacteriophage infection, transfection, conjugation, protoplast fusion, lipofection, electroporation, calcium phosphate precipitation, polyethyleneimine (PEI)-mediated transfection, DEAE-dextran mediated transfection, liposome-mediated transfection, particle gun technology, calcium phosphate precipitation, direct micro injection, nanoparticle-mediated nucleic acid delivery (see, e.g., Panyam et., al Adv Drug Deliv Rev. 2012 Sep. 13. pii: S0169-409X(12)00283-9. doi: 10.1016/j.addr.2012.09.023), and the like.

[0601] Contacting cells with a PAMmer, and/or Cas9 guide RNA, and/or Cas9 protein may occur in any culture media and under any culture conditions that promote the survival of the cells. For example, cells may be suspended in any appropriate nutrient medium that is convenient, such as Iscove's modified DMEM or RPMI 1640, supplemented with fetal calf serum or heat inactivated goat serum (about 5-10%), L-glutamine, a thiol, particularly 2-mercaptoethanol, and antibiotics, e.g. penicillin and streptomycin. The culture may contain growth factors to which the cells are responsive. Growth factors, as defined herein, are molecules capable of promoting survival, growth and/or differentiation of cells, either in culture or in the intact tissue, through specific effects on a transmembrane receptor. Growth factors include polypeptides and non-polypeptide factors. Conditions that promote the survival of cells are typically permissive of the subject cleavage and binding methods

[0602] In some embodiments, a nucleotide sequence encoding a Cas9 protein can be codon optimized. In some cases, a codon optimized nucleotide sequence encoding a Cas9 protein encodes a variant Cas9 protein. In some cases, a codon optimized nucleotide sequence encoding a Cas9 protein encodes a chimeric Cas9 protein (a Cas9 fusion protein). Codon optimization is known in the art and entails the mutation of foreign-derived DNA to mimic the codon preferences of the intended host organism or host cell while encoding the same protein. Thus, the codons are changed, but the encoded protein remains unchanged. For example, if the intended target and/or host cell was a human cell, a Cas9 protein, or Cas9 variant, encoded by a human codon optimized nucleotide sequence would be a suitable Cas9 protein. As another non-limiting example, if the intended target and/or host cell was a mouse cell, a Cas9 protein, or Cas9 variant, encoded by a mouse codon optimized nucleotide sequence would be a suitable Cas9 protein. While codon optimization is not required, it is acceptable and may be preferable in certain cases.

[0603] In some embodiments, a Cas9 guide RNA and/or a Cas9 protein and/or PAMmer can be provided as RNA. In such cases, the Cas9 guide RNA and/or the RNA encoding the Cas9 protein and/or the PAMmer can be produced by direct chemical synthesis or may be transcribed in vitro from a DNA (e.g., encoding the Cas9 guide RNA, the PAMmer, and/or the Cas9 protein). Methods of synthesizing RNA from a DNA template are well known in the art. In some cases, the Cas9 guide RNA and/or the PAMmer and/or the RNA encoding the Cas9 protein will be synthesized in vitro using an RNA polymerase enzyme (e.g., T7 polymerase, T3 polymerase, SP6 polymerase, etc.). Once synthesized, the RNA may directly contact a target nucleic acid or may be introduced into a cell by any of the well-known techniques for introducing nucleic acids into cells (e.g., microinjection, electroporation, transfection, etc). In some cases, a PAMmer is a DNA oligonucleotide and can be produced using any convenient method (e.g., chemical synthesis).

[0604] Nucleotides encoding a Cas9 guide RNA (introduced either as DNA or RNA) and/or a Cas9 protein (introduced as DNA or RNA) and/or a PAMmer (introduced either as DNA or RNA) may be provided to the cells using well-developed transfection techniques; see, e.g. Angel and Yanik (2010) PLoS ONE 5(7): e11756, and the commercially available TransMessenger® reagents from Qiagen, Stemfect™ RNA Transfection Kit from Stemgent, and TransIT®-mRNA Transfection Kit from Mirus Bio LLC. See also Beumer et al. (2008) Efficient gene targeting in Drosophila by direct embryo injection with zinc-finger nucleases. PNAS 105(50):19821-19826. Alternatively, nucleic acids encoding a Cas9 guide RNA and/or a Cas9 protein and/or a chimeric Cas9 protein and/or a PAMmer may be provided on DNA vectors. Many vectors, e.g. plasmids, cosmids, minicircles, phage, viruses, etc., useful for transferring nucleic acids into target cells are available. The vectors comprising the nucleic acid(s) may be maintained episomally, e.g. as plasmids, minicircle DNAs, viruses such cytomegalovirus, adenovirus, etc., or they may be integrated into the target cell genome, through homologous recombination or random integration, e.g. retrovirus-derived vectors such as MMLV, HIV-1, ALV, etc.

[0605] Vectors may be provided directly to the subject cells. In other words, the cells are contacted with vectors comprising the nucleic acid encoding Cas9 guide RNA and/or a Cas9 protein and/or a chimeric Cas9 protein and/or a PAMmer such that the vectors are taken up by the cells. Methods for contacting cells with nucleic acid vectors that are plasmids, including electroporation, calcium chloride transfection, microinjection, and lipofection are well known in the art. For viral vector delivery, the cells are contacted with viral particles comprising the nucleic acid encoding a Cas9 guide RNA and/or a Cas9 protein and/or a chimeric Cas9 protein and/or a PAMmer. Retroviruses, for example, lentiviruses, are suitable for use in methods of the present disclosure. Commonly used retroviral vectors are “defective”, i.e. unable to produce viral proteins required for productive infection. Rather, replication of the vector requires growth in a packaging cell line. To generate viral particles comprising nucleic acids of interest, the retroviral nucleic acids comprising the nucleic acid are packaged into viral capsids by a packaging cell line. Different packaging cell lines provide a different envelope protein (ecotropic, amphotropic or xenotropic) to be incorporated into the capsid, this envelope protein determining the specificity of the viral particle for the cells (ecotropic for murine and rat; amphotropic for most mammalian cell types including human, dog and mouse; and xenotropic for most mammalian cell types except murine cells). The appropriate packaging cell line may be used to ensure that the cells are targeted by the packaged viral particles. Methods of introducing the retroviral vectors comprising the nucleic acid encoding the reprogramming factors into packaging cell lines and of collecting the viral particles that are generated by the packaging lines are well known in the art. Nucleic acids can also introduced by direct micro-injection (e.g., injection of RNA into a zebrafish embryo).

[0606] Vectors used for providing the nucleic acids encoding Cas9 guide RNA and/or a Cas9 protein and/or a chimeric Cas9 protein and/or a PAMmer to the subject cells will typically comprise suitable promoters for driving the expression, that is, transcriptional activation, of the nucleic acid of interest. In other words, the nucleic acid of interest will be operably linked to a promoter. This may include ubiquitously acting promoters, for example, the CMV-β-actin promoter, or inducible promoters, such as promoters that are active in particular cell populations or that respond to the presence of drugs such as tetracycline. By transcriptional activation, it is intended that transcription will be increased above basal levels in the target cell by 10 fold, by 100 fold, more usually by 1000 fold. In addition, vectors used for providing a Cas9 guide RNA and/or a Cas9 protein and/or a chimeric Cas9 protein and/or a PAMmer to the subject cells may include nucleic acid sequences that encode for selectable markers in the target cells, so as to identify cells that have taken up the Cas9 guide RNA and/or a Cas9 protein and/or a chimeric Cas9 protein and/or a PAMmer.

[0607] A Cas9 guide RNA and/or a Cas9 protein and/or a chimeric Cas9 protein may instead be used to contact DNA or introduced into cells as RNA. Methods of introducing RNA into cells are known in the art and may include, for example, direct injection, transfection, or any other method used for the introduction of DNA.

[0608] A Cas9 protein may instead be provided to cells as a polypeptide. Such a polypeptide may optionally be fused to a polypeptide domain that increases solubility of the product. The domain may be linked to the polypeptide through a defined protease cleavage site, e.g. a TEV sequence, which is cleaved by TEV protease. The linker may also include one or more flexible sequences, e.g. from 1 to 10 glycine residues. In some embodiments, the cleavage of the fusion protein is performed in a buffer that maintains solubility of the product, e.g. in the presence of from 0.5 to 2 M urea, in the presence of polypeptides and/or polynucleotides that increase solubility, and the like. Domains of interest include endosomolytic domains, e.g. influenza HA domain; and other polypeptides that aid in production, e.g. IF2 domain, GST domain, GRPE domain, and the like. The polypeptide may be formulated for improved stability. For example, the peptides may be PEGylated, where the polyethyleneoxy group provides for enhanced lifetime in the blood stream.

[0609] Additionally or alternatively, the Cas9 protein may be fused to a polypeptide permeant domain to promote uptake by the cell. A number of permeant domains are known in the art and may be used in the non-integrating polypeptides of the present disclosure, including peptides, peptidomimetics, and non-peptide carriers. For example, a permeant peptide may be derived from the third alpha helix of Drosophila melanogaster transcription factor Antennapaedia, referred to as penetratin, which comprises the amino acid sequence RQIKIWFQNRRMKWKK (SEQ ID NO:268). As another example, the permeant peptide comprises the HIV-1 tat basic region amino acid sequence, which may include, for example, amino acids 49-57 of naturally-occurring tat protein. Other permeant domains include poly-arginine motifs, for example, the region of amino acids 34-56 of HIV-1 rev protein, nona-arginine, octa-arginine, and the like. (See, for example, Futaki et al. (2003) Curr Protein Pept Sci. 2003 April; 4(2): 87-9 and 446; and Wender et al. (2000) Proc. Natl. Acad. Sci. U.S.A 2000 Nov. 21; 97(24):13003-8; published U.S. Patent applications 20030220334; 20030083256; 20030032593; and 20030022831, herein specifically incorporated by reference for the teachings of translocation peptides and peptoids). The nona-arginine (R9) sequence is one of the more efficient PTDs that have been characterized (Wender et al. 2000; Uemura et al. 2002). The site at which the fusion is made may be selected in order to optimize the biological activity, secretion or binding characteristics of the polypeptide. The optimal site will be determined by routine experimentation.

[0610] A Cas9 protein may be produced in vitro or by eukaryotic cells or by prokaryotic cells, and it may be further processed by unfolding, e.g. heat denaturation, DTT reduction, etc. and may be further refolded, using methods known in the art.

[0611] Modifications of interest that do not alter primary sequence include chemical derivatization of polypeptides, e.g., acylation, acetylation, carboxylation, amidation, etc. Also included are modifications of glycosylation, e.g. those made by modifying the glycosylation patterns of a polypeptide during its synthesis and processing or in further processing steps; e.g. by exposing the polypeptide to enzymes which affect glycosylation, such as mammalian glycosylating or deglycosylating enzymes. Also embraced are sequences that have phosphorylated amino acid residues, e.g. phosphotyrosine, phosphoserine, or phosphothreonine.

[0612] Also suitable for inclusion in embodiments of the present disclosure are Cas9 guide RNAs, PAMmers (e.g., quenched PAMmers), and Cas9 proteins that have been modified using ordinary molecular biological techniques and synthetic chemistry so as to improve their resistance to proteolytic degradation, to change the target sequence specificity, to optimize solubility properties, to alter protein activity (e.g., transcription modulatory activity, enzymatic activity, etc) or to render them more suitable as a therapeutic agent. Analogs of such polypeptides include those containing residues other than naturally occurring L-amino acids, e.g. D-amino acids or non-naturally occurring synthetic amino acids. D-amino acids may be substituted for some or all of the amino acid residues.

[0613] The Cas9 proteins may be prepared by in vitro synthesis, using conventional methods as known in the art. Various commercial synthetic apparatuses are available, for example, automated synthesizers by Applied Biosystems, Inc., Beckman, etc. By using synthesizers, naturally occurring amino acids may be substituted with unnatural amino acids. The particular sequence and the manner of preparation will be determined by convenience, economics, purity required, and the like.

[0614] If desired, various groups may be introduced into the peptide during synthesis or during expression, which allow for linking to other molecules or to a surface. Thus cysteines can be used to make thioethers, histidines for linking to a metal ion complex, carboxyl groups for forming amides or esters, amino groups for forming amides, and the like.

[0615] The Cas9 proteins may also be isolated and purified in accordance with conventional methods of recombinant synthesis. A lysate may be prepared of the expression host and the lysate purified using HPLC, exclusion chromatography, gel electrophoresis, affinity chromatography, or other purification technique. For the most part, the compositions which are used will comprise 20% or more by weight of the desired product, more usually 75% or more by weight, preferably 95% or more by weight, and for therapeutic purposes, usually 99.5% or more by weight, in relation to contaminants related to the method of preparation of the product and its purification. Usually, the percentages will be based upon total protein.

[0616] To induce cleavage or any desired modification to a target nucleic acid, or any desired modification to a polypeptide associated with target nucleic acid, the Cas9 guide RNA and/or the Cas9 protein and/or the PAMmer, whether they be introduced as nucleic acids or polypeptides, are provided to the cells for about 30 minutes to about 24 hours, e.g., 1 hour, 1.5 hours, 2 hours, 2.5 hours, 3 hours, 3.5 hours 4 hours, 5 hours, 6 hours, 7 hours, 8 hours, 12 hours, 16 hours, 18 hours, 20 hours, or any other period from about 30 minutes to about 24 hours, which may be repeated with a frequency of about every day to about every 4 days, e.g., every 1.5 days, every 2 days, every 3 days, or any other frequency from about every day to about every four days. The agent(s) may be provided to the subject cells one or more times, e.g. one time, twice, three times, or more than three times, and the cells allowed to incubate with the agent(s) for some amount of time following each contacting event e.g. 16-24 hours, after which time the media is replaced with fresh media and the cells are cultured further.

[0617] In cases in which two or more different targeting complexes are provided to the cell (e.g., two different Cas9 guide RNAs that are complementary to different sequences within the same or different target nucleic acid), the complexes may be provided simultaneously (e.g. as two polypeptides and/or nucleic acids), or delivered simultaneously. Alternatively, they may be provided consecutively, e.g. the targeting complex being provided first, followed by the second targeting complex, etc. or vice versa.

[0618] Nucleic Acid Modifications

[0619] In some embodiments, a subject nucleic acid (e.g., a Cas9 guide RNA, a PAMmer, etc.) has one or more modifications, e.g., a base modification, a backbone modification, etc, to provide the nucleic acid with a new or enhanced feature (e.g., improved stability). A nucleoside is a base-sugar combination. The base portion of the nucleoside is normally a heterocyclic base. The two most common classes of such heterocyclic bases are the purines and the pyrimidines. Nucleotides are nucleosides that further include a phosphate group covalently linked to the sugar portion of the nucleoside. For those nucleosides that include a pentofuranosyl sugar, the phosphate group can be linked to the 2′, the 3′, or the 5′ hydroxyl moiety of the sugar. In forming oligonucleotides, the phosphate groups covalently link adjacent nucleosides to one another to form a linear polymeric compound. In turn, the respective ends of this linear polymeric compound can be further joined to form a circular compound, however, linear compounds are suitable. In addition, linear compounds may have internal nucleotide base complementarity and may therefore fold in a manner as to produce a fully or partially double-stranded compound. Within oligonucleotides, the phosphate groups are commonly referred to as forming the internucleoside backbone of the oligonucleotide. The normal linkage or backbone of RNA and DNA is a 3′ to 5′ phosphodiester linkage.

[0620] Suitable nucleic acid modifications include, but are not limited to: 2′Omethyl modified nucleotides, 2′ Fluoro modified nucleotides, locked nucleic acid (LNA) modified nucleotides, peptide nucleic acid (PNA) modified nucleotides, nucleotides with phosphorothioate linkages, and a 5′ cap (e.g., a 7-methylguanylate cap (m7G)). Additional details and additional modifications are described below.

[0621] In some cases, 2% or more of the nucleotides of a subject nucleic acid (e.g., a Cas9 guide RNA, a PAMmer, etc.) are modified (e.g., 3% or more, 5% or more, 7.5% or more, 10% or more, 15% or more, 20% or more, 25% or more, 30% or more, 35% or more, 40% or more, 45% or more, 50% or more, 55% or more, 60% or more, 65% or more, 75% or more, 80% or more, 85% or more, 90% or more, 95% or more, or 100% of the nucleotides of a subject nucleic acid are modified). In some cases, 2% or more of the nucleotides of a subject PAMmer are modified (e.g., 3% or more, 5% or more, 7.5% or more, 10% or more, 15% or more, 20% or more, 25% or more, 30% or more, 35% or more, 40% or more, 45% or more, 50% or more, 55% or more, 60% or more, 65% or more, 75% or more, 80% or more, 85% or more, 90% or more, 95% or more, or 100% of the nucleotides of a subject PAMmer are modified). In some cases, 2% or more of the nucleotides of a Cas9 guide RNA are modified (e.g., 3% or more, 5% or more, 7.5% or more, 10% or more, 15% or more, 20% or more, 25% or more, 30% or more, 35% or more, 40% or more, 45% or more, 50% or more, 55% or more, 60% or more, 65% or more, 75% or more, 80% or more, 85% or more, 90% or more, 95% or more, or 100% of the nucleotides of a Cas9 guide RNA are modified).

[0622] In some cases, the number of nucleotides of a subject nucleic acid nucleic acid (e.g., a Cas9 guide RNA, a PAMmer, etc.) that are modified is in a range of from 3% to 100% (e.g., 3% to 100%, 3% to 95%, 3% to 90%, 3% to 85%, 3% to 80%, 3% to 75%, 3% to 70%, 3% to 65%, 3% to 60%, 3% to 55%, 3% to 50%, 3% to 45%, 3% to 40%, 5% to 100%, 5% to 95%, 5% to 90%, 5% to 85%, 5% to 80%, 5% to 75%, 5% to 70%, 5% to 65%, 5% to 60%, 5% to 55%, 5% to 50%, 5% to 45%, 5% to 40%, 10% to 100%, 10% to 95%, 10% to 90%, 10% to 85%, 10% to 80%, 10% to 75%, 10% to 70%, 10% to 65%, 10% to 60%, 10% to 55%, 10% to 50%, 10% to 45%, or 10% to 40%). In some cases, the number of nucleotides of a subject PAMmer that are modified is in a range of from 3% to 100% (e.g., 3% to 100%, 3% to 95%, 3% to 90%, 3% to 85%, 3% to 80%, 3% to 75%, 3% to 70%, 3% to 65%, 3% to 60%, 3% to 55%, 3% to 50%, 3% to 45%, 3% to 40%, 5% to 100%, 5% to 95%, 5% to 90%, 5% to 85%, 5% to 80%, 5% to 75%, 5% to 70%, 5% to 65%, 5% to 60%, 5% to 55%, 5% to 50%, 5% to 45%, 5% to 40%, 10% to 100%, 10% to 95%, 10% to 90%, 10% to 85%, 10% to 80%, 10% to 75%, 10% to 70%, 10% to 65%, 10% to 60%, 10% to 55%, 10% to 50%, 10% to 45%, or 10% to 40%). In some cases, the number of nucleotides of a Cas9 guide RNA that are modified is in a range of from 3% to 100% (e.g., 3% to 100%, 3% to 95%, 3% to 90%, 3% to 85%, 3% to 80%, 3% to 75%, 3% to 70%, 3% to 65%, 3% to 60%, 3% to 55%, 3% to 50%, 3% to 45%, 3% to 40%, 5% to 100%, 5% to 95%, 5% to 90%, 5% to 85%, 5% to 80%, 5% to 75%, 5% to 70%, 5% to 65%, 5% to 60%, 5% to 55%, 5% to 50%, 5% to 45%, 5% to 40%, 10% to 100%, 10% to 95%, 10% to 90%, 10% to 85%, 10% to 80%, 10% to 75%, 10% to 70%, 10% to 65%, 10% to 60%, 10% to 55%, 10% to 50%, 10% to 45%, or 10% to 40%).

[0623] In some cases, one or more of the nucleotides of a subject nucleic acid (e.g., a Cas9 guide RNA, a PAMmer, etc.) are modified (e.g., 2 or more, 3 or more, 4 or more, 5 or more, 6 or more, 7 or more, 8 or more, 9 ore more, 10 or more, 11 or more, 12 or more, 13 or more, 14 or more, 15 or more, 16 or more, 17 or more, 18 or more, 19 ore more, 20 or more, 21 or more, 22 or more, or all of the nucleotides of a subject nucleic acid are modified). In some cases, one or more of the nucleotides of a subject PAMmer are modified (e.g., 2 or more, 3 or more, 4 or more, 5 or more, 6 or more, 7 or more, 8 or more, 9 ore more, 10 or more, 11 or more, 12 or more, 13 or more, 14 or more, 15 or more, 16 or more, 17 or more, 18 or more, 19 ore more, 20 or more, 21 or more, 22 or more, or all of the nucleotides of a subject PAMmer are modified). In some cases, one or more of the nucleotides of a Cas9 guide RNA are modified (e.g., 2 or more, 3 or more, 4 or more, 5 or more, 6 or more, 7 or more, 8 or more, 9 ore more, 10 or more, 11 or more, 12 or more, 13 or more, 14 or more, 15 or more, 16 or more, 17 or more, 18 or more, 19 ore more, 20 or more, 21 or more, 22 or more, or all of the nucleotides of a Cas9 guide RNA are modified).

[0624] In some cases, 99% or less of the nucleotides of a subject nucleic acid (e.g., a Cas9 guide RNA, a PAMmer, etc.) are modified (e.g., 99% or less, 95% or less, 90% or less, 85% or less, 80% or less, 75% or less, 70% or less, 65% or less, 60% or less, 55% or less, 50% or less, or 45% or less of the nucleotides of a subject nucleic acid are modified). In some cases, 99% or less of the nucleotides of a subject PAMmer are modified (e.g., e.g., 99% or less, 95% or less, 90% or less, 85% or less, 80% or less, 75% or less, 70% or less, 65% or less, 60% or less, 55% or less, 50% or less, or 45% or less of the nucleotides of a subject PAMmer are modified). In some cases, 99% or less of the nucleotides of a Cas9 guide RNA are modified (e.g., 99% or less, 95% or less, 90% or less, 85% or less, 80% or less, 75% or less, 70% or less, 65% or less, 60% or less, 55% or less, 50% or less, or 45% or less of the nucleotides of a Cas9 guide RNA are modified).

[0625] In some cases, the number of nucleotides of a subject nucleic acid nucleic acid (e.g., a Cas9 guide RNA, a PAMmer, etc.) that are modified is in a range of from 1 to 30 (e.g., 1 to 25, 1 to 20, 1 to 18, 1 to 15, 1 to 10, 2 to 25, 2 to 20, 2 to 18, 2 to 15, 2 to 10, 3 to 25, 3 to 20, 3 to 18, 3 to 15, or 3 to 10). In some cases, the number of nucleotides of a subject PAMmer that are modified is in a range of from 1 to 30 (e.g., 1 to 25, 1 to 20, 1 to 18, 1 to 15, 1 to 10, 2 to 25, 2 to 20, 2 to 18, 2 to 15, 2 to 10, 3 to 25, 3 to 20, 3 to 18, 3 to 15, or 3 to 10). In some cases, the number of nucleotides of a Cas9 guide RNA that are modified is in a range of from 1 to 30 (e.g., 1 to 25, 1 to 20, 1 to 18, 1 to 15, 1 to 10, 2 to 25, 2 to 20, 2 to 18, 2 to 15, 2 to 10, 3 to 25, 3 to 20, 3 to 18, 3 to 15, or 3 to 10).

[0626] In some cases, 20 or fewer of the nucleotides of a subject nucleic acid (e.g., a Cas9 guide RNA, a PAMmer, etc.) are modified (e.g., 19 or fewer, 18 or fewer, 17 or fewer, 16 or fewer, 15 or fewer, 14 or fewer, 13 or fewer, 12 or fewer, 11 or fewer, 10 or fewer, 9 or fewer, 8 or fewer, 7 or fewer, 6 or fewer, 5 or fewer, 4 or fewer, 3 or fewer, 2 or fewer, or one, of the nucleotides of a subject nucleic acid are modified). In some cases, 20 or fewer of the nucleotides of a subject PAMmer are modified (e.g., 19 or fewer, 18 or fewer, 17 or fewer, 16 or fewer, 15 or fewer, 14 or fewer, 13 or fewer, 12 or fewer, 11 or fewer, 10 or fewer, 9 or fewer, 8 or fewer, 7 or fewer, 6 or fewer, 5 or fewer, 4 or fewer, 3 or fewer, 2 or fewer, or one, of the nucleotides of a subject PAMmer are modified). In some cases, 20 or fewer of the nucleotides of a Cas9 guide RNA are modified (e.g., 19 or fewer, 18 or fewer, 17 or fewer, 16 or fewer, 15 or fewer, 14 or fewer, 13 or fewer, 12 or fewer, 11 or fewer, 10 or fewer, 9 or fewer, 8 or fewer, 7 or fewer, 6 or fewer, 5 or fewer, 4 or fewer, 3 or fewer, 2 or fewer, or one, of the nucleotides of a Cas9 guide RNA are modified).

[0627] A 2′-O-Methyl modified nucleotide (also referred to as 2′-O-Methyl RNA) is a naturally occurring modification of RNA found in tRNA and other small RNAs that arises as a post-transcriptional modification. Oligonucleotides can be directly synthesized that contain 2′-O-Methyl RNA. This modification increases Tm of RNA:RNA duplexes but results in only small changes in RNA:DNA stability. It is stable with respect to attack by single-stranded ribonucleases and is typically 5 to 10-fold less susceptible to DNases than DNA. It is commonly used in antisense oligos as a means to increase stability and binding affinity to the target message.

[0628] In some cases, 2% or more of the nucleotides of a subject nucleic acid (e.g., a Cas9 guide RNA, a PAMmer, etc.) are 2′-O-Methyl modified (e.g., 3% or more, 5% or more, 7.5% or more, 10% or more, 15% or more, 20% or more, 25% or more, 30% or more, 35% or more, 40% or more, 45% or more, 50% or more, 55% or more, 60% or more, 65% or more, 75% or more, 80% or more, 85% or more, 90% or more, 95% or more, or 100% of the nucleotides of a subject nucleic acid are 2′-O-Methyl modified). In some cases, 2% or more of the nucleotides of a subject PAMmer are 2′-O-Methyl modified (e.g., 3% or more, 5% or more, 7.5% or more, 10% or more, 15% or more, 20% or more, 25% or more, 30% or more, 35% or more, 40% or more, 45% or more, 50% or more, 55% or more, 60% or more, 65% or more, 75% or more, 80% or more, 85% or more, 90% or more, 95% or more, or 100% of the nucleotides of a subject PAMmer are 2′-O-Methyl modified). In some cases, 2% or more of the nucleotides of a Cas9 guide RNA are 2′-O-Methyl modified (e.g., 3% or more, 5% or more, 7.5% or more, 10% or more, 15% or more, 20% or more, 25% or more, 30% or more, 35% or more, 40% or more, 45% or more, 50% or more, 55% or more, 60% or more, 65% or more, 75% or more, 80% or more, 85% or more, 90% or more, 95% or more, or 100% of the nucleotides of a Cas9 guide RNA are 2′-O-Methyl modified).

[0629] In some cases, the number of nucleotides of a subject nucleic acid nucleic acid (e.g., a Cas9 guide RNA, a PAMmer, etc.) that are 2′-O-Methyl modified is in a range of from 3% to 100% (e.g., 3% to 100%, 3% to 95%, 3% to 90%, 3% to 85%, 3% to 80%, 3% to 75%, 3% to 70%, 3% to 65%, 3% to 60%, 3% to 55%, 3% to 50%, 3% to 45%, 3% to 40%, 5% to 100%, 5% to 95%, 5% to 90%, 5% to 85%, 5% to 80%, 5% to 75%, 5% to 70%, 5% to 65%, 5% to 60%, 5% to 55%, 5% to 50%, 5% to 45%, 5% to 40%, 10% to 100%, 10% to 95%, 10% to 90%, 10% to 85%, 10% to 80%, 10% to 75%, 10% to 70%, 10% to 65%, 10% to 60%, 10% to 55%, 10% to 50%, 10% to 45%, or 10% to 40%). In some cases, the number of nucleotides of a subject PAMmer that are 2′-O-Methyl modified is in a range of from 3% to 100% (e.g., 3% to 100%, 3% to 95%, 3% to 90%, 3% to 85%, 3% to 80%, 3% to 75%, 3% to 70%, 3% to 65%, 3% to 60%, 3% to 55%, 3% to 50%, 3% to 45%, 3% to 40%, 5% to 100%, 5% to 95%, 5% to 90%, 5% to 85%, 5% to 80%, 5% to 75%, 5% to 70%, 5% to 65%, 5% to 60%, 5% to 55%, 5% to 50%, 5% to 45%, 5% to 40%, 10% to 100%, 10% to 95%, 10% to 90%, 10% to 85%, 10% to 80%, 10% to 75%, 10% to 70%, 10% to 65%, 10% to 60%, 10% to 55%, 10% to 50%, 10% to 45%, or 10% to 40%). In some cases, the number of nucleotides of a Cas9 guide RNA that are 2′-O-Methyl modified is in a range of from 3% to 100% (e.g., 3% to 100%, 3% to 95%, 3% to 90%, 3% to 85%, 3% to 80%, 3% to 75%, 3% to 70%, 3% to 65%, 3% to 60%, 3% to 55%, 3% to 50%, 3% to 45%, 3% to 40%, 5% to 100%, 5% to 95%, 5% to 90%, 5% to 85%, 5% to 80%, 5% to 75%, 5% to 70%, 5% to 65%, 5% to 60%, 5% to 55%, 5% to 50%, 5% to 45%, 5% to 40%, 10% to 100%, 10% to 95%, 10% to 90%, 10% to 85%, 10% to 80%, 10% to 75%, 10% to 70%, 10% to 65%, 10% to 60%, 10% to 55%, 10% to 50%, 10% to 45%, or 10% to 40%).

[0630] In some cases, one or more of the nucleotides of a subject nucleic acid (e.g., a Cas9 guide RNA, a PAMmer, etc.) are 2′-O-Methyl modified (e.g., 2 or more, 3 or more, 4 or more, 5 or more, 6 or more, 7 or more, 8 or more, 9 ore more, 10 or more, 11 or more, 12 or more, 13 or more, 14 or more, 15 or more, 16 or more, 17 or more, 18 or more, 19 ore more, 20 or more, 21 or more, 22 or more, or all of the nucleotides of a subject nucleic acid are 2′-O-Methyl modified). In some cases, one or more of the nucleotides of a subject PAMmer are 2′-O-Methyl modified (e.g., 2 or more, 3 or more, 4 or more, 5 or more, 6 or more, 7 or more, 8 or more, 9 ore more, 10 or more, 11 or more, 12 or more, 13 or more, 14 or more, 15 or more, 16 or more, 17 or more, 18 or more, 19 ore more, 20 or more, 21 or more, 22 or more, or all of the nucleotides of a subject PAMmer are 2′-O-Methyl modified). In some cases, one or more of the nucleotides of a Cas9 guide RNA are 2′-O-Methyl modified (e.g., 2 or more, 3 or more, 4 or more, 5 or more, 6 or more, 7 or more, 8 or more, 9 ore more, 10 or more, 11 or more, 12 or more, 13 or more, 14 or more, 15 or more, 16 or more, 17 or more, 18 or more, 19 ore more, 20 or more, 21 or more, 22 or more, or all of the nucleotides of a Cas9 guide RNA are 2′-O-Methyl modified).

[0631] In some cases, 99% or less of the nucleotides of a subject nucleic acid (e.g., a Cas9 guide RNA, a PAMmer, etc.) are 2′-O-Methyl modified (e.g., 99% or less, 95% or less, 90% or less, 85% or less, 80% or less, 75% or less, 70% or less, 65% or less, 60% or less, 55% or less, 50% or less, or 45% or less of the nucleotides of a subject nucleic acid are 2′-O-Methyl modified). In some cases, 99% or less of the nucleotides of a subject PAMmer are 2′-O-Methyl modified (e.g., e.g., 99% or less, 95% or less, 90% or less, 85% or less, 80% or less, 75% or less, 70% or less, 65% or less, 60% or less, 55% or less, 50% or less, or 45% or less of the nucleotides of a subject PAMmer are 2′-O-Methyl modified). In some cases, 99% or less of the nucleotides of a Cas9 guide RNA are 2′-O-Methyl modified (e.g., 99% or less, 95% or less, 90% or less, 85% or less, 80% or less, 75% or less, 70% or less, 65% or less, 60% or less, 55% or less, 50% or less, or 45% or less of the nucleotides of a Cas9 guide RNA are 2′-O-Methyl modified).

[0632] In some cases, the number of nucleotides of a subject nucleic acid nucleic acid (e.g., a Cas9 guide RNA, a PAMmer, etc.) that are 2′-O-Methyl modified is in a range of from 1 to 30 (e.g., 1 to 25, 1 to 20, 1 to 18, 1 to 15, 1 to 10, 2 to 25, 2 to 20, 2 to 18, 2 to 15, 2 to 10, 3 to 25, 3 to 20, 3 to 18, 3 to 15, or 3 to 10). In some cases, the number of nucleotides of a subject PAMmer that are 2′-O-Methyl modified is in a range of from 1 to 30 (e.g., 1 to 25, 1 to 20, 1 to 18, 1 to 15, 1 to 10, 2 to 25, 2 to 20, 2 to 18, 2 to 15, 2 to 10, 3 to 25, 3 to 20, 3 to 18, 3 to 15, or 3 to 10). In some cases, the number of nucleotides of a Cas9 guide RNA that are 2′-O-Methyl modified is in a range of from 1 to 30 (e.g., 1 to 25, 1 to 20, 1 to 18, 1 to 15, 1 to 10, 2 to 25, 2 to 20, 2 to 18, 2 to 15, 2 to 10, 3 to 25, 3 to 20, 3 to 18, 3 to 15, or 3 to 10).

[0633] In some cases, 20 or fewer of the nucleotides of a subject nucleic acid (e.g., a Cas9 guide RNA, a PAMmer, etc.) are 2′-O-Methyl modified (e.g., 19 or fewer, 18 or fewer, 17 or fewer, 16 or fewer, 15 or fewer, 14 or fewer, 13 or fewer, 12 or fewer, 11 or fewer, 10 or fewer, 9 or fewer, 8 or fewer, 7 or fewer, 6 or fewer, 5 or fewer, 4 or fewer, 3 or fewer, 2 or fewer, or one, of the nucleotides of a subject nucleic acid are 2′-O-Methyl modified). In some cases, 20 or fewer of the nucleotides of a subject PAMmer are 2′-O-Methyl modified (e.g., 19 or fewer, 18 or fewer, 17 or fewer, 16 or fewer, 15 or fewer, 14 or fewer, 13 or fewer, 12 or fewer, 11 or fewer, 10 or fewer, 9 or fewer, 8 or fewer, 7 or fewer, 6 or fewer, 5 or fewer, 4 or fewer, 3 or fewer, 2 or fewer, or one, of the nucleotides of a subject PAMmer are 2′-O-Methyl modified). In some cases, 20 or fewer of the nucleotides of a Cas9 guide RNA are 2′-O-Methyl modified (e.g., 19 or fewer, 18 or fewer, 17 or fewer, 16 or fewer, 15 or fewer, 14 or fewer, 13 or fewer, 12 or fewer, 11 or fewer, 10 or fewer, 9 or fewer, 8 or fewer, 7 or fewer, 6 or fewer, 5 or fewer, 4 or fewer, 3 or fewer, 2 or fewer, or one, of the nucleotides of a Cas9 guide RNA are 2′-O-Methyl modified).

[0634] 2′ Fluoro modified nucleotides (e.g., 2′ Fluoro bases) have a fluorine modified ribose which increases binding affinity (Tm) and also confers some relative nuclease resistance when compared to native RNA. These modifications are commonly employed in ribozymes and siRNAs to improve stability in serum or other biological fluids.

[0635] In some cases, 2% or more of the nucleotides of a subject nucleic acid (e.g., a Cas9 guide RNA, a PAMmer, etc.) are 2′ Fluoro modified (e.g., 3% or more, 5% or more, 7.5% or more, 10% or more, 15% or more, 20% or more, 25% or more, 30% or more, 35% or more, 40% or more, 45% or more, 50% or more, 55% or more, 60% or more, 65% or more, 75% or more, 80% or more, 85% or more, 90% or more, 95% or more, or 100% of the nucleotides of a subject nucleic acid are 2′ Fluoro modified). In some cases, 2% or more of the nucleotides of a subject PAMmer are 2′ Fluoro modified (e.g., 3% or more, 5% or more, 7.5% or more, 10% or more, 15% or more, 20% or more, 25% or more, 30% or more, 35% or more, 40% or more, 45% or more, 50% or more, 55% or more, 60% or more, 65% or more, 75% or more, 80% or more, 85% or more, 90% or more, 95% or more, or 100% of the nucleotides of a subject PAMmer are 2′ Fluoro modified). In some cases, 2% or more of the nucleotides of a Cas9 guide RNA are 2′ Fluoro modified (e.g., 3% or more, 5% or more, 7.5% or more, 10% or more, 15% or more, 20% or more, 25% or more, 30% or more, 35% or more, 40% or more, 45% or more, 50% or more, 55% or more, 60% or more, 65% or more, 75% or more, 80% or more, 85% or more, 90% or more, 95% or more, or 100% of the nucleotides of a Cas9 guide RNA are 2′ Fluoro modified).

[0636] In some cases, the number of nucleotides of a subject nucleic acid nucleic acid (e.g., a Cas9 guide RNA, a PAMmer, etc.) that are 2′ Fluoro modified is in a range of from 3% to 100% (e.g., 3% to 100%, 3% to 95%, 3% to 90%, 3% to 85%, 3% to 80%, 3% to 75%, 3% to 70%, 3% to 65%, 3% to 60%, 3% to 55%, 3% to 50%, 3% to 45%, 3% to 40%, 5% to 100%, 5% to 95%, 5% to 90%, 5% to 85%, 5% to 80%, 5% to 75%, 5% to 70%, 5% to 65%, 5% to 60%, 5% to 55%, 5% to 50%, 5% to 45%, 5% to 40%, 10% to 100%, 10% to 95%, 10% to 90%, 10% to 85%, 10% to 80%, 10% to 75%, 10% to 70%, 10% to 65%, 10% to 60%, 10% to 55%, 10% to 50%, 10% to 45%, or 10% to 40%). In some cases, the number of nucleotides of a subject PAMmer that are 2′ Fluoro modified is in a range of from 3% to 100% (e.g., 3% to 100%, 3% to 95%, 3% to 90%, 3% to 85%, 3% to 80%, 3% to 75%, 3% to 70%, 3% to 65%, 3% to 60%, 3% to 55%, 3% to 50%, 3% to 45%, 3% to 40%, 5% to 100%, 5% to 95%, 5% to 90%, 5% to 85%, 5% to 80%, 5% to 75%, 5% to 70%, 5% to 65%, 5% to 60%, 5% to 55%, 5% to 50%, 5% to 45%, 5% to 40%, 10% to 100%, 10% to 95%, 10% to 90%, 10% to 85%, 10% to 80%, 10% to 75%, 10% to 70%, 10% to 65%, 10% to 60%, 10% to 55%, 10% to 50%, 10% to 45%, or 10% to 40%). In some cases, the number of nucleotides of a Cas9 guide RNA that are 2′ Fluoro modified is in a range of from 3% to 100% (e.g., 3% to 100%, 3% to 95%, 3% to 90%, 3% to 85%, 3% to 80%, 3% to 75%, 3% to 70%, 3% to 65%, 3% to 60%, 3% to 55%, 3% to 50%, 3% to 45%, 3% to 40%, 5% to 100%, 5% to 95%, 5% to 90%, 5% to 85%, 5% to 80%, 5% to 75%, 5% to 70%, 5% to 65%, 5% to 60%, 5% to 55%, 5% to 50%, 5% to 45%, 5% to 40%, 10% to 100%, 10% to 95%, 10% to 90%, 10% to 85%, 10% to 80%, 10% to 75%, 10% to 70%, 10% to 65%, 10% to 60%, 10% to 55%, 10% to 50%, 10% to 45%, or 10% to 40%).

[0637] In some cases, one or more of the nucleotides of a subject nucleic acid (e.g., a Cas9 guide RNA, a PAMmer, etc.) are 2′ Fluoro modified (e.g., 2 or more, 3 or more, 4 or more, 5 or more, 6 or more, 7 or more, 8 or more, 9 ore more, 10 or more, 11 or more, 12 or more, 13 or more, 14 or more, 15 or more, 16 or more, 17 or more, 18 or more, 19 ore more, 20 or more, 21 or more, 22 or more, or all of the nucleotides of a subject nucleic acid are 2′ Fluoro modified). In some cases, one or more of the nucleotides of a subject PAMmer are 2′ Fluoro modified (e.g., 2 or more, 3 or more, 4 or more, 5 or more, 6 or more, 7 or more, 8 or more, 9 ore more, 10 or more, 11 or more, 12 or more, 13 or more, 14 or more, 15 or more, 16 or more, 17 or more, 18 or more, 19 ore more, 20 or more, 21 or more, 22 or more, or all of the nucleotides of a subject PAMmer are 2′ Fluoro modified). In some cases, one or more of the nucleotides of a Cas9 guide RNA are 2′ Fluoro modified (e.g., 2 or more, 3 or more, 4 or more, 5 or more, 6 or more, 7 or more, 8 or more, 9 ore more, 10 or more, 11 or more, 12 or more, 13 or more, 14 or more, 15 or more, 16 or more, 17 or more, 18 or more, 19 ore more, 20 or more, 21 or more, 22 or more, or all of the nucleotides of a Cas9 guide RNA are 2′ Fluoro modified).

[0638] In some cases, 99% or less of the nucleotides of a subject nucleic acid (e.g., a Cas9 guide RNA, a PAMmer, etc.) are 2′ Fluoro modified (e.g., 99% or less, 95% or less, 90% or less, 85% or less, 80% or less, 75% or less, 70% or less, 65% or less, 60% or less, 55% or less, 50% or less, or 45% or less of the nucleotides of a subject nucleic acid are 2′ Fluoro modified). In some cases, 99% or less of the nucleotides of a subject PAMmer are 2′ Fluoro modified (e.g., e.g., 99% or less, 95% or less, 90% or less, 85% or less, 80% or less, 75% or less, 70% or less, 65% or less, 60% or less, 55% or less, 50% or less, or 45% or less of the nucleotides of a subject PAMmer are 2′ Fluoro modified). In some cases, 99% or less of the nucleotides of a Cas9 guide RNA are 2′ Fluoro modified (e.g., 99% or less, 95% or less, 90% or less, 85% or less, 80% or less, 75% or less, 70% or less, 65% or less, 60% or less, 55% or less, 50% or less, or 45% or less of the nucleotides of a Cas9 guide RNA are 2′ Fluoro modified).

[0639] In some cases, the number of nucleotides of a subject nucleic acid nucleic acid (e.g., a Cas9 guide RNA, a PAMmer, etc.) that are 2′ Fluoro modified is in a range of from 1 to 30 (e.g., 1 to 25, 1 to 20, 1 to 18, 1 to 15, 1 to 10, 2 to 25, 2 to 20, 2 to 18, 2 to 15, 2 to 10, 3 to 25, 3 to 20, 3 to 18, 3 to 15, or 3 to 10). In some cases, the number of nucleotides of a subject PAMmer that are 2′ Fluoro modified is in a range of from 1 to 30 (e.g., 1 to 25, 1 to 20, 1 to 18, 1 to 15, 1 to 10, 2 to 25, 2 to 20, 2 to 18, 2 to 15, 2 to 10, 3 to 25, 3 to 20, 3 to 18, 3 to 15, or 3 to 10). In some cases, the number of nucleotides of a Cas9 guide RNA that are 2′ Fluoro modified is in a range of from 1 to 30 (e.g., 1 to 25, 1 to 20, 1 to 18, 1 to 15, 1 to 10, 2 to 25, 2 to 20, 2 to 18, 2 to 15, 2 to 10, 3 to 25, 3 to 20, 3 to 18, 3 to 15, or 3 to 10).

[0640] In some cases, 20 or fewer of the nucleotides of a subject nucleic acid (e.g., a Cas9 guide RNA, a PAMmer, etc.) are 2′ Fluoro modified (e.g., 19 or fewer, 18 or fewer, 17 or fewer, 16 or fewer, 15 or fewer, 14 or fewer, 13 or fewer, 12 or fewer, 11 or fewer, 10 or fewer, 9 or fewer, 8 or fewer, 7 or fewer, 6 or fewer, 5 or fewer, 4 or fewer, 3 or fewer, 2 or fewer, or one, of the nucleotides of a subject nucleic acid are 2′ Fluoro modified). In some cases, 20 or fewer of the nucleotides of a subject PAMmer are 2′ Fluoro modified (e.g., 19 or fewer, 18 or fewer, 17 or fewer, 16 or fewer, 15 or fewer, 14 or fewer, 13 or fewer, 12 or fewer, 11 or fewer, 10 or fewer, 9 or fewer, 8 or fewer, 7 or fewer, 6 or fewer, 5 or fewer, 4 or fewer, 3 or fewer, 2 or fewer, or one, of the nucleotides of a subject PAMmer are 2′ Fluoro modified). In some cases, 20 or fewer of the nucleotides of a Cas9 guide RNA are 2′ Fluoro modified (e.g., 19 or fewer, 18 or fewer, 17 or fewer, 16 or fewer, 15 or fewer, 14 or fewer, 13 or fewer, 12 or fewer, 11 or fewer, 10 or fewer, 9 or fewer, 8 or fewer, 7 or fewer, 6 or fewer, 5 or fewer, 4 or fewer, 3 or fewer, 2 or fewer, or one, of the nucleotides of a Cas9 guide RNA are 2′ Fluoro modified).

[0641] LNA bases have a modification to the ribose backbone that locks the base in the C3′-endo position, which favors RNA A-type helix duplex geometry. This modification significantly increases Tm and is also very nuclease resistant. Multiple LNA insertions can be placed in an oligo at any position except the 3′-end. Applications have been described ranging from antisense oligos to hybridization probes to SNP detection and allele specific PCR. Due to the large increase in Tm conferred by LNAs, they also can cause an increase in primer dimer formation as well as self-hairpin formation. In some cases, the number of LNAs incorporated into a single oligo is 10 bases or less.

[0642] In some cases, the number of nucleotides of a subject nucleic acid nucleic acid (e.g., a Cas9 guide RNA, a PAMmer, etc.) that have an LNA base is in a range of from 3% to 99% (e.g., 3% to 99%, 3% to 95%, 3% to 90%, 3% to 85%, 3% to 80%, 3% to 75%, 3% to 70%, 3% to 65%, 3% to 60%, 3% to 55%, 3% to 50%, 3% to 45%, 3% to 40%, 5% to 99%, 5% to 95%, 5% to 90%, 5% to 85%, 5% to 80%, 5% to 75%, 5% to 70%, 5% to 65%, 5% to 60%, 5% to 55%, 5% to 50%, 5% to 45%, 5% to 40%, 10% to 99%, 10% to 95%, 10% to 90%, 10% to 85%, 10% to 80%, 10% to 75%, 10% to 70%, 10% to 65%, 10% to 60%, 10% to 55%, 10% to 50%, 10% to 45%, or 10% to 40%). In some cases, the number of nucleotides of a subject PAMmer that have an LNA base is in a range of from 3% to 99% (e.g., 3% to 99%, 3% to 95%, 3% to 90%, 3% to 85%, 3% to 80%, 3% to 75%, 3% to 70%, 3% to 65%, 3% to 60%, 3% to 55%, 3% to 50%, 3% to 45%, 3% to 40%, 5% to 99%, 5% to 95%, 5% to 90%, 5% to 85%, 5% to 80%, 5% to 75%, 5% to 70%, 5% to 65%, 5% to 60%, 5% to 55%, 5% to 50%, 5% to 45%, 5% to 40%, 10% to 99%, 10% to 95%, 10% to 90%, 10% to 85%, 10% to 80%, 10% to 75%, 10% to 70%, 10% to 65%, 10% to 60%, 10% to 55%, 10% to 50%, 10% to 45%, or 10% to 40%). In some cases, the number of nucleotides of a Cas9 guide RNA that have an LNA base is in a range of from 3% to 99% (e.g., 3% to 99%, 3% to 95%, 3% to 90%, 3% to 85%, 3% to 80%, 3% to 75%, 3% to 70%, 3% to 65%, 3% to 60%, 3% to 55%, 3% to 50%, 3% to 45%, 3% to 40%, 5% to 99%, 5% to 95%, 5% to 90%, 5% to 85%, 5% to 80%, 5% to 75%, 5% to 70%, 5% to 65%, 5% to 60%, 5% to 55%, 5% to 50%, 5% to 45%, 5% to 40%, 10% to 99%, 10% to 95%, 10% to 90%, 10% to 85%, 10% to 80%, 10% to 75%, 10% to 70%, 10% to 65%, 10% to 60%, 10% to 55%, 10% to 50%, 10% to 45%, or 10% to 40%).

[0643] In some cases, one or more of the nucleotides of a subject nucleic acid (e.g., a Cas9 guide RNA, a PAMmer, etc.) have an LNA base (e.g., 2 or more, 3 or more, 4 or more, 5 or more, 6 or more, 7 or more, 8 or more, 9 ore more, 10 or more, 11 or more, 12 or more, 13 or more, 14 or more, 15 or more, 16 or more, 17 or more, 18 or more, 19 ore more, 20 or more, 21 or more, 22 or more, or all of the nucleotides of a subject nucleic acid have an LNA base). In some cases, one or more of the nucleotides of a subject PAMmer have an LNA base (e.g., 2 or more, 3 or more, 4 or more, 5 or more, 6 or more, 7 or more, 8 or more, 9 ore more, 10 or more, 11 or more, 12 or more, 13 or more, 14 or more, 15 or more, 16 or more, 17 or more, 18 or more, 19 ore more, 20 or more, 21 or more, 22 or more, or all of the nucleotides of a subject PAMmer have an LNA base). In some cases, one or more of the nucleotides of a Cas9 guide RNA have an LNA base (e.g., 2 or more, 3 or more, 4 or more, 5 or more, 6 or more, 7 or more, 8 or more, 9 ore more, 10 or more, 11 or more, 12 or more, 13 or more, 14 or more, 15 or more, 16 or more, 17 or more, 18 or more, 19 ore more, 20 or more, 21 or more, 22 or more, or all of the nucleotides of a Cas9 guide RNA have an LNA base).

[0644] In some cases, 99% or less of the nucleotides of a subject nucleic acid (e.g., a Cas9 guide RNA, a PAMmer, etc.) have an LNA base (e.g., 99% or less, 95% or less, 90% or less, 85% or less, 80% or less, 75% or less, 70% or less, 65% or less, 60% or less, 55% or less, 50% or less, or 45% or less of the nucleotides of a subject nucleic acid have an LNA base). In some cases, 99% or less of the nucleotides of a subject PAMmer have an LNA base (e.g., e.g., 99% or less, 95% or less, 90% or less, 85% or less, 80% or less, 75% or less, 70% or less, 65% or less, 60% or less, 55% or less, 50% or less, or 45% or less of the nucleotides of a subject PAMmer have an LNA base). In some cases, 99% or less of the nucleotides of a Cas9 guide RNA have an LNA base (e.g., 99% or less, 95% or less, 90% or less, 85% or less, 80% or less, 75% or less, 70% or less, 65% or less, 60% or less, 55% or less, 50% or less, or 45% or less of the nucleotides of a Cas9 guide RNA have an LNA base).

[0645] In some cases, the number of nucleotides of a subject nucleic acid nucleic acid (e.g., a Cas9 guide RNA, a PAMmer, etc.) that have an LNA base is in a range of from 1 to 30 (e.g., 1 to 25, 1 to 20, 1 to 18, 1 to 15, 1 to 10, 2 to 25, 2 to 20, 2 to 18, 2 to 15, 2 to 10, 3 to 25, 3 to 20, 3 to 18, 3 to 15, or 3 to 10). In some cases, the number of nucleotides of a subject PAMmer that have an LNA base is in a range of from 1 to 30 (e.g., 1 to 25, 1 to 20, 1 to 18, 1 to 15, 1 to 10, 2 to 25, 2 to 20, 2 to 18, 2 to 15, 2 to 10, 3 to 25, 3 to 20, 3 to 18, 3 to 15, or 3 to 10). In some cases, the number of nucleotides of a Cas9 guide RNA that have an LNA base is in a range of from 1 to 30 (e.g., 1 to 25, 1 to 20, 1 to 18, 1 to 15, 1 to 10, 2 to 25, 2 to 20, 2 to 18, 2 to 15, 2 to 10, 3 to 25, 3 to 20, 3 to 18, 3 to 15, or 3 to 10).

[0646] In some cases, 20 or fewer of the nucleotides of a subject nucleic acid (e.g., a Cas9 guide RNA, a PAMmer, etc.) have an LNA base (e.g., 19 or fewer, 18 or fewer, 17 or fewer, 16 or fewer, 15 or fewer, 14 or fewer, 13 or fewer, 12 or fewer, 11 or fewer, 10 or fewer, 9 or fewer, 8 or fewer, 7 or fewer, 6 or fewer, 5 or fewer, 4 or fewer, 3 or fewer, 2 or fewer, or one, of the nucleotides of a subject nucleic acid have an LNA base). In some cases, 20 or fewer of the nucleotides of a subject PAMmer have an LNA base (e.g., 19 or fewer, 18 or fewer, 17 or fewer, 16 or fewer, 15 or fewer, 14 or fewer, 13 or fewer, 12 or fewer, 11 or fewer, 10 or fewer, 9 or fewer, 8 or fewer, 7 or fewer, 6 or fewer, 5 or fewer, 4 or fewer, 3 or fewer, 2 or fewer, or one, of the nucleotides of a subject PAMmer have an LNA base). In some cases, 20 or fewer of the nucleotides of a Cas9 guide RNA have an LNA base (e.g., 19 or fewer, 18 or fewer, 17 or fewer, 16 or fewer, 15 or fewer, 14 or fewer, 13 or fewer, 12 or fewer, 11 or fewer, 10 or fewer, 9 or fewer, 8 or fewer, 7 or fewer, 6 or fewer, 5 or fewer, 4 or fewer, 3 or fewer, 2 or fewer, or one, of the nucleotides of a Cas9 guide RNA have an LNA base).

[0647] The phosphorothioate (PS) bond (i.e., a phosphorothioate linkage) substitutes a sulfur atom for a non-bridging oxygen in the phosphate backbone of a nucleic acid (e.g., an oligo). This modification renders the internucleotide linkage resistant to nuclease degradation. Phosphorothioate bonds can be introduced between the last 3-5 nucleotides at the 5′- or 3′-end of the oligo to inhibit exonuclease degradation. Including phosphorothioate bonds within the oligo (e.g., throughout the entire oligo) can help reduce attack by endonucleases as well.

[0648] In some cases, the number of nucleotides of a subject nucleic acid nucleic acid (e.g., a Cas9 guide RNA, a PAMmer, etc.) that have a phosphorothioate linkage is in a range of from 3% to 99% (e.g., 3% to 99%, 3% to 95%, 3% to 90%, 3% to 85%, 3% to 80%, 3% to 75%, 3% to 70%, 3% to 65%, 3% to 60%, 3% to 55%, 3% to 50%, 3% to 45%, 3% to 40%, 5% to 99%, 5% to 95%, 5% to 90%, 5% to 85%, 5% to 80%, 5% to 75%, 5% to 70%, 5% to 65%, 5% to 60%, 5% to 55%, 5% to 50%, 5% to 45%, 5% to 40%, 10% to 99%, 10% to 95%, 10% to 90%, 10% to 85%, 10% to 80%, 10% to 75%, 10% to 70%, 10% to 65%, 10% to 60%, 10% to 55%, 10% to 50%, 10% to 45%, or 10% to 40%). In some cases, the number of nucleotides of a subject PAMmer that have a phosphorothioate linkage is in a range of from 3% to 99% (e.g., 3% to 99%, 3% to 95%, 3% to 90%, 3% to 85%, 3% to 80%, 3% to 75%, 3% to 70%, 3% to 65%, 3% to 60%, 3% to 55%, 3% to 50%, 3% to 45%, 3% to 40%, 5% to 99%, 5% to 95%, 5% to 90%, 5% to 85%, 5% to 80%, 5% to 75%, 5% to 70%, 5% to 65%, 5% to 60%, 5% to 55%, 5% to 50%, 5% to 45%, 5% to 40%, 10% to 99%, 10% to 95%, 10% to 90%, 10% to 85%, 10% to 80%, 10% to 75%, 10% to 70%, 10% to 65%, 10% to 60%, 10% to 55%, 10% to 50%, 10% to 45%, or 10% to 40%). In some cases, the number of nucleotides of a Cas9 guide RNA that have a phosphorothioate linkage is in a range of from 3% to 99% (e.g., 3% to 99%, 3% to 95%, 3% to 90%, 3% to 85%, 3% to 80%, 3% to 75%, 3% to 70%, 3% to 65%, 3% to 60%, 3% to 55%, 3% to 50%, 3% to 45%, 3% to 40%, 5% to 99%, 5% to 95%, 5% to 90%, 5% to 85%, 5% to 80%, 5% to 75%, 5% to 70%, 5% to 65%, 5% to 60%, 5% to 55%, 5% to 50%, 5% to 45%, 5% to 40%, 10% to 99%, 10% to 95%, 10% to 90%, 10% to 85%, 10% to 80%, 10% to 75%, 10% to 70%, 10% to 65%, 10% to 60%, 10% to 55%, 10% to 50%, 10% to 45%, or 10% to 40%).

[0649] In some cases, one or more of the nucleotides of a subject nucleic acid (e.g., a Cas9 guide RNA, a PAMmer, etc.) have a phosphorothioate linkage (e.g., 2 or more, 3 or more, 4 or more, 5 or more, 6 or more, 7 or more, 8 or more, 9 ore more, 10 or more, 11 or more, 12 or more, 13 or more, 14 or more, 15 or more, 16 or more, 17 or more, 18 or more, 19 ore more, 20 or more, 21 or more, 22 or more, or all of the nucleotides of a subject nucleic acid have a phosphorothioate linkage). In some cases, one or more of the nucleotides of a subject PAMmer have a phosphorothioate linkage (e.g., 2 or more, 3 or more, 4 or more, 5 or more, 6 or more, 7 or more, 8 or more, 9 ore more, 10 or more, 11 or more, 12 or more, 13 or more, 14 or more, 15 or more, 16 or more, 17 or more, 18 or more, 19 ore more, 20 or more, 21 or more, 22 or more, or all of the nucleotides of a subject PAMmer have a phosphorothioate linkage). In some cases, one or more of the nucleotides of a Cas9 guide RNA have a phosphorothioate linkage (e.g., 2 or more, 3 or more, 4 or more, 5 or more, 6 or more, 7 or more, 8 or more, 9 ore more, 10 or more, 11 or more, 12 or more, 13 or more, 14 or more, 15 or more, 16 or more, 17 or more, 18 or more, 19 ore more, 20 or more, 21 or more, 22 or more, or all of the nucleotides of a Cas9 guide RNA have a phosphorothioate linkage).

[0650] In some cases, 99% or less of the nucleotides of a subject nucleic acid (e.g., a Cas9 guide RNA, a PAMmer, etc.) have a phosphorothioate linkage (e.g., 99% or less, 95% or less, 90% or less, 85% or less, 80% or less, 75% or less, 70% or less, 65% or less, 60% or less, 55% or less, 50% or less, or 45% or less of the nucleotides of a subject nucleic acid have a phosphorothioate linkage). In some cases, 99% or less of the nucleotides of a subject PAMmer have a phosphorothioate linkage (e.g., e.g., 99% or less, 95% or less, 90% or less, 85% or less, 80% or less, 75% or less, 70% or less, 65% or less, 60% or less, 55% or less, 50% or less, or 45% or less of the nucleotides of a subject PAMmer have a phosphorothioate linkage). In some cases, 99% or less of the nucleotides of a Cas9 guide RNA have a phosphorothioate linkage (e.g., 99% or less, 95% or less, 90% or less, 85% or less, 80% or less, 75% or less, 70% or less, 65% or less, 60% or less, 55% or less, 50% or less, or 45% or less of the nucleotides of a Cas9 guide RNA have a phosphorothioate linkage).

[0651] In some cases, the number of nucleotides of a subject nucleic acid nucleic acid (e.g., a Cas9 guide RNA, a PAMmer, etc.) that have a phosphorothioate linkage is in a range of from 1 to 30 (e.g., 1 to 25, 1 to 20, 1 to 18, 1 to 15, 1 to 10, 2 to 25, 2 to 20, 2 to 18, 2 to 15, 2 to 10, 3 to 25, 3 to 20, 3 to 18, 3 to 15, or 3 to 10). In some cases, the number of nucleotides of a subject PAMmer that have a phosphorothioate linkage is in a range of from 1 to 30 (e.g., 1 to 25, 1 to 20, 1 to 18, 1 to 15, 1 to 10, 2 to 25, 2 to 20, 2 to 18, 2 to 15, 2 to 10, 3 to 25, 3 to 20, 3 to 18, 3 to 15, or 3 to 10). In some cases, the number of nucleotides of a Cas9 guide RNA that have a phosphorothioate linkage is in a range of from 1 to 30 (e.g., 1 to 25, 1 to 20, 1 to 18, 1 to 15, 1 to 10, 2 to 25, 2 to 20, 2 to 18, 2 to 15, 2 to 10, 3 to 25, 3 to 20, 3 to 18, 3 to 15, or 3 to 10).

[0652] In some cases, 20 or fewer of the nucleotides of a subject nucleic acid (e.g., a Cas9 guide RNA, a PAMmer, etc.) have a phosphorothioate linkage (e.g., 19 or fewer, 18 or fewer, 17 or fewer, 16 or fewer, 15 or fewer, 14 or fewer, 13 or fewer, 12 or fewer, 11 or fewer, 10 or fewer, 9 or fewer, 8 or fewer, 7 or fewer, 6 or fewer, 5 or fewer, 4 or fewer, 3 or fewer, 2 or fewer, or one, of the nucleotides of a subject nucleic acid have a phosphorothioate linkage). In some cases, 20 or fewer of the nucleotides of a subject PAMmer have a phosphorothioate linkage (e.g., 19 or fewer, 18 or fewer, 17 or fewer, 16 or fewer, 15 or fewer, 14 or fewer, 13 or fewer, 12 or fewer, 11 or fewer, 10 or fewer, 9 or fewer, 8 or fewer, 7 or fewer, 6 or fewer, 5 or fewer, 4 or fewer, 3 or fewer, 2 or fewer, or one, of the nucleotides of a subject PAMmer have a phosphorothioate linkage). In some cases, 20 or fewer of the nucleotides of a Cas9 guide RNA have a phosphorothioate linkage (e.g., 19 or fewer, 18 or fewer, 17 or fewer, 16 or fewer, 15 or fewer, 14 or fewer, 13 or fewer, 12 or fewer, 11 or fewer, 10 or fewer, 9 or fewer, 8 or fewer, 7 or fewer, 6 or fewer, 5 or fewer, 4 or fewer, 3 or fewer, 2 or fewer, or one, of the nucleotides of a Cas9 guide RNA have a phosphorothioate linkage).

[0653] In some embodiments, a subject nucleic acid (e.g., a Cas9 guide RNA, a PAMmer, etc.) has one or more nucleotides that are 2′-O-Methyl modified nucleotides. In some embodiments, a subject nucleic acid (e.g., a Cas9 guide RNA, a PAMmer, etc.) has one or more 2′ Fluoro modified nucleotides. In some embodiments, a subject nucleic acid (e.g., a Cas9 guide RNA, a PAMmer, etc.) has one or more LNA bases. In some embodiments, a subject nucleic acid (e.g., a Cas9 guide RNA, a PAMmer, etc.) has one or more nucleotides that are linked by a phosphorothioate bond (i.e., the subject nucleic acid has one or more phosphorothioate linkages). In some embodiments, a subject nucleic acid (e.g., a Cas9 guide RNA, a PAMmer, etc.) has a 5′ cap (e.g., a 7-methylguanylate cap (m7G)).

[0654] In some embodiments, a subject nucleic acid (e.g., a Cas9 guide RNA, a PAMmer, etc.) has a combination of modified nucleotides. For example, a subject nucleic acid (e.g., a Cas9 guide RNA, a PAMmer, etc.) can have a 5′ cap (e.g., a 7-methylguanylate cap (m7G)) in addition to having one or more nucleotides with other modifications (e.g., a 2′-O-Methyl nucleotide and/or a 2′ Fluoro modified nucleotide and/or a LNA base and/or a phosphorothioate linkage). See, e.g., FIG. 17 and FIG. 21 for working examples that utilize subject nucleic acids having one or more modified nucleotides. A subject nucleic acid can have any combination of modifications. For example, a subject nucleic acid can have any combination of the above described modifications.

[0655] In some embodiments, a Cas9 guide RNA has one or more nucleotides that are 2′-O-Methyl modified nucleotides. In some embodiments, a Cas9 guide RNA has one or more 2′ Fluoro modified nucleotides. In some embodiments, a Cas9 guide RNA has one or more LNA bases. In some embodiments, a Cas9 guide RNA has one or more nucleotides that are linked by a phosphorothioate bond (i.e., the subject nucleic acid has one or more phosphorothioate linkages). In some embodiments, a Cas9 guide RNA has a 5′ cap (e.g., a 7-methylguanylate cap (m7G)).

[0656] In some embodiments, a Cas9 guide RNA has a combination of modified nucleotides. For example, a Cas9 guide RNA can have a 5′ cap (e.g., a 7-methylguanylate cap (m7G)) in addition to having one or more nucleotides with other modifications (e.g., a 2′-O-Methyl nucleotide and/or a 2′ Fluoro modified nucleotide and/or a LNA base and/or a phosphorothioate linkage). A Cas9 guide RNA can have any combination of modifications. For example, a Cas9 guide RNA can have any combination of the above described modifications.

[0657] In some embodiments, a subject PAMmer has one or more nucleotides that are 2′-O-Methyl modified nucleotides. In some embodiments, a subject PAMmer has one or more 2′ Fluoro modified nucleotides. In some embodiments, a subject PAMmer has one or more LNA bases. In some embodiments, a subject PAMmer has one or more nucleotides that are linked by a phosphorothioate bond (i.e., the subject nucleic acid has one or more phosphorothioate linkages). In some embodiments, a subject PAMmer has a 5′ cap (e.g., a 7-methylguanylate cap (m7G)).

[0658] In some embodiments, a subject PAMmer has a combination of modified nucleotides. For example, a subject PAMmer can have a 5′ cap (e.g., a 7-methylguanylate cap (m7G)) in addition to having one or more nucleotides with other modifications (e.g., a 2′-O-Methyl nucleotide and/or a 2′ Fluoro modified nucleotide and/or a LNA base and/or a phosphorothioate linkage). See, e.g., FIG. 17 and FIG. 21 for working examples that utilize PAMmers having one or more modified nucleotides. A subject PAMmer can have any combination of modifications. For example, a subject PAMmer can have any combination of the above described modifications.

[0659] Modified Backbones and Modified Internucleoside Linkages

[0660] Examples of suitable nucleic acids containing modifications include nucleic acids containing modified backbones or non-natural internucleoside linkages. Nucleic acids having modified backbones include those that retain a phosphorus atom in the backbone and those that do not have a phosphorus atom in the backbone.

[0661] Suitable modified oligonucleotide backbones containing a phosphorus atom therein include, for example, phosphorothioates, chiral phosphorothioates, phosphorodithioates, phosphotriesters, aminoalkylphosphotriesters, methyl and other alkyl phosphonates including 3′-alkylene phosphonates, 5′-alkylene phosphonates and chiral phosphonates, phosphinates, phosphoramidates including 3′-amino phosphoramidate and aminoalkylphosphoramidates, phosphorodiamidates, thionophosphoramidates, thionoalkylphosphonates, thionoalkylphosphotriesters, selenophosphates and boranophosphates having normal 3′-5′ linkages, 2′-5′ linked analogs of these, and those having inverted polarity wherein one or more internucleotide linkages is a 3′ to 3′, 5′ to 5′ or 2′ to 2′ linkage. Suitable oligonucleotides having inverted polarity comprise a single 3′ to 3′ linkage at the 3′-most internucleotide linkage i.e. a single inverted nucleoside residue which may be a basic (the nucleobase is missing or has a hydroxyl group in place thereof). Various salts (such as, for example, potassium or sodium), mixed salts and free acid forms are also included.

[0662] In some embodiments, a subject nucleic acid comprises one or more phosphorothioate and/or heteroatom internucleoside linkages, in particular —CH₂—NH—O—CH₂—, —CH₂—N(CH₃)—O—CH₂— (known as a methylene (methylimino) or MMI backbone), —CH₂—O—N(CH₃)—CH₂—, —CH₂—N(CH₃)—N(CH₃)—CH₂— and —O—N(CH₃)—CH₂—CH₂— (wherein the native phosphodiester internucleotide linkage is represented as —O—P(═O)(OH)—O—CH₂—). MMI type internucleoside linkages are disclosed in the above referenced U.S. Pat. No. 5,489,677. Suitable amide internucleoside linkages are disclosed in t U.S. Pat. No. 5,602,240.

[0663] Also suitable are nucleic acids having morpholino backbone structures as described in, e.g., U.S. Pat. No. 5,034,506. For example, in some embodiments, a subject nucleic acid comprises a 6-membered morpholino ring in place of a ribose ring. In some of these embodiments, a phosphorodiamidate or other non-phosphodiester internucleoside linkage replaces a phosphodiester linkage.

[0664] Suitable modified polynucleotide backbones that do not include a phosphorus atom therein have backbones that are formed by short chain alkyl or cycloalkyl internucleoside linkages, mixed heteroatom and alkyl or cycloalkyl internucleoside linkages, or one or more short chain heteroatomic or heterocyclic internucleoside linkages. These include those having morpholino linkages (formed in part from the sugar portion of a nucleoside); siloxane backbones; sulfide, sulfoxide and sulfone backbones; formacetyl and thioformacetyl backbones; methylene formacetyl and thioformacetyl backbones; riboacetyl backbones; alkene containing backbones; sulfamate backbones; methyleneimino and methylenehydrazino backbones; sulfonate and sulfonamide backbones; amide backbones; and others having mixed N, O, S and CH₂ component parts.

[0665] Mimetics

[0666] A subject nucleic acid can be a nucleic acid mimetic. The term “mimetic” as it is applied to polynucleotides is intended to include polynucleotides wherein only the furanose ring or both the furanose ring and the internucleotide linkage are replaced with non-furanose groups, replacement of only the furanose ring is also referred to in the art as being a sugar surrogate. The heterocyclic base moiety or a modified heterocyclic base moiety is maintained for hybridization with an appropriate target nucleic acid. One such nucleic acid, a polynucleotide mimetic that has been shown to have excellent hybridization properties, is referred to as a peptide nucleic acid (PNA). In PNA, the sugar-backbone of a polynucleotide is replaced with an amide containing backbone, in particular an aminoethylglycine backbone. The nucleotides are retained and are bound directly or indirectly to aza nitrogen atoms of the amide portion of the backbone.

[0667] One polynucleotide mimetic that has been reported to have excellent hybridization properties is a peptide nucleic acid (PNA). The backbone in PNA compounds is two or more linked aminoethylglycine units which gives PNA an amide containing backbone. The heterocyclic base moieties are bound directly or indirectly to aza nitrogen atoms of the amide portion of the backbone. Representative U.S. patents that describe the preparation of PNA compounds include, but are not limited to: U.S. Pat. Nos. 5,539,082; 5,714,331; and 5,719,262.

[0668] Another class of polynucleotide mimetic that has been studied is based on linked morpholino units (morpholino nucleic acid) having heterocyclic bases attached to the morpholino ring. A number of linking groups have been reported that link the morpholino monomeric units in a morpholino nucleic acid. One class of linking groups has been selected to give a non-ionic oligomeric compound. The non-ionic morpholino-based oligomeric compounds are less likely to have undesired interactions with cellular proteins. Morpholino-based polynucleotides are non-ionic mimics of oligonucleotides which are less likely to form undesired interactions with cellular proteins (Dwaine A. Braasch and David R. Corey, Biochemistry, 2002, 41(14), 4503-4510). Morpholino-based polynucleotides are disclosed in U.S. Pat. No. 5,034,506. A variety of compounds within the morpholino class of polynucleotides have been prepared, having a variety of different linking groups joining the monomeric subunits.

[0669] A further class of polynucleotide mimetic is referred to as cyclohexenyl nucleic acids (CeNA). The furanose ring normally present in a DNA/RNA molecule is replaced with a cyclohexenyl ring. CeNA DMT protected phosphoramidite monomers have been prepared and used for oligomeric compound synthesis following classical phosphoramidite chemistry. Fully modified CeNA oligomeric compounds and oligonucleotides having specific positions modified with CeNA have been prepared and studied (see Wang et al., J. Am. Chem. Soc., 2000, 122, 8595-8602). In general the incorporation of CeNA monomers into a DNA chain increases its stability of a DNA/RNA hybrid. CeNA oligoadenylates formed complexes with RNA and DNA complements with similar stability to the native complexes. The study of incorporating CeNA structures into natural nucleic acid structures was shown by NMR and circular dichroism to proceed with easy conformational adaptation.

[0670] A further modification includes Locked Nucleic Acids (LNAs) in which the 2′-hydroxyl group is linked to the 4′ carbon atom of the sugar ring thereby forming a 2′-C,4′-C-oxymethylene linkage thereby forming a bicyclic sugar moiety. The linkage can be a methylene (—CH₂—), group bridging the 2′ oxygen atom and the 4′ carbon atom wherein n is 1 or 2 (Singh et al., Chem. Commun., 1998, 4, 455-456). LNA and LNA analogs display very high duplex thermal stabilities with complementary DNA and RNA (Tm=+3 to +10° C.), stability towards 3′-exonucleolytic degradation and good solubility properties. Potent and nontoxic antisense oligonucleotides containing LNAs have been described (e.g., Wahlestedt et al., Proc. Natl. Acad. Sci. U.S.A., 2000, 97, 5633-5638).

[0671] The synthesis and preparation of the LNA monomers adenine, cytosine, guanine, 5-methyl-cytosine, thymine and uracil, along with their oligomerization, and nucleic acid recognition properties have been described (e.g., Koshkin et al., Tetrahedron, 1998, 54, 3607-3630). LNAs and preparation thereof are also described in WO 98/39352 and WO 99/14226, as well as U.S. applications 20120165514, 20100216983, 20090041809, 20060117410, 20040014959, 20020094555, and 20020086998.

[0672] Modified Sugar Moieties

[0673] A subject nucleic acid can also include one or more substituted sugar moieties. Suitable polynucleotides comprise a sugar substituent group selected from: OH; F; O-, S-, or N-alkyl; O-, S-, or N-alkenyl; O-, S- or N-alkynyl; or O-alkyl-O-alkyl, wherein the alkyl, alkenyl and alkynyl may be substituted or unsubstituted C₁ to C₁₀ alkyl or C₂ to C₁₀ alkenyl and alkynyl. Particularly suitable are O((CH₂)ₙO)ₘCH₃, O(CH₂)ₙOCH₃, O(CH₂)ₙNH₂, O(CH₂)ₙCH₃, O(CH₂)ₙONH₂, and O(CH₂)ₙON((CH₂)ₙCH₃)₂, where n and m are from 1 to about 10. Other suitable polynucleotides comprise a sugar substituent group selected from: C₁ to C₁₀ lower alkyl, substituted lower alkyl, alkenyl, alkynyl, alkaryl, aralkyl, O-alkaryl or O-aralkyl, SH, SCH₃, OCN, Cl, Br, CN, CF₃, OCF₃, SOCH₃, SO₂CH₃, ONO₂, NO₂, N₃, NH₂, heterocycloalkyl, heterocycloalkaryl, aminoalkylamino, polyalkylamino, substituted silyl, an RNA cleaving group, a reporter group, an intercalator, a group for improving the pharmacokinetic properties of an oligonucleotide, or a group for improving the pharmacodynamic properties of an oligonucleotide, and other substituents having similar properties. A suitable modification includes 2′-methoxyethoxy (2′-O—CH₂CH₂OCH₃, also known as 2′-O-(2-methoxyethyl) or 2′-MOE) (Martin et al., Helv. Chim. Acta, 1995, 78, 486-504) i.e., an alkoxyalkoxy group. A further suitable modification includes 2′-dimethylaminooxyethoxy, i.e., a O(CH₂)₂ON(CH₃)₂ group, also known as 2′-DMAOE, as described in examples hereinbelow, and 2′-dimethylaminoethoxyethoxy (also known in the art as 2′-O-dimethyl-amino-ethoxy-ethyl or 2′-DMAEOE), i.e., 2′-O—CH₂—O—CH₂—N(CH₃)₂.

[0674] Other suitable sugar substituent groups include methoxy (—O—CH₃), aminopropoxy (—OCH₂CH₂CH₂NH₂), allyl (—CH₂—CH═CH₂), —O-allyl (—O—CH₂—CH═CH₂) and fluoro (F). 2′-sugar substituent groups may be in the arabino (up) position or ribo (down) position. A suitable 2′-arabino modification is 2′-F. Similar modifications may also be made at other positions on the oligomeric compound, particularly the 3′ position of the sugar on the 3′ terminal nucleoside or in 2′-5′ linked oligonucleotides and the 5′ position of 5′ terminal nucleotide. Oligomeric compounds may also have sugar mimetics such as cyclobutyl moieties in place of the pentofuranosyl sugar.

[0675] Base Modifications and Substitutions

[0676] A subject nucleic acid may also include nucleobase (often referred to in the art simply as “base”) modifications or substitutions. As used herein, “unmodified” or “natural” nucleobases include the purine bases adenine (A) and guanine (G), and the pyrimidine bases thymine (T), cytosine (C) and uracil (U). Modified nucleobases include other synthetic and natural nucleobases such as 5-methylcytosine (5-me-C), 5-hydroxymethyl cytosine, xanthine, hypoxanthine, 2-aminoadenine, 6-methyl and other alkyl derivatives of adenine and guanine, 2-propyl and other alkyl derivatives of adenine and guanine, 2-thiouracil, 2-thiothymine and 2-thiocytosine, 5-halouracil and cytosine, 5-propynyl (—C═C—CH₃) uracil and cytosine and other alkynyl derivatives of pyrimidine bases, 6-azo uracil, cytosine and thymine, 5-uracil (pseudouracil), 4-thiouracil, 8-halo, 8-amino, 8-thiol, 8-thioalkyl, 8-hydroxyl and other 8-substituted adenines and guanines, 5-halo particularly 5-bromo, 5-trifluoromethyl and other 5-substituted uracils and cytosines, 7-methylguanine and 7-methyladenine, 2-F-adenine, 2-amino-adenine, 8-azaguanine and 8-azaadenine, 7-deazaguanine and 7-deazaadenine and 3-deazaguanine and 3-deazaadenine. Further modified nucleobases include tricyclic pyrimidines such as phenoxazine cytidine(1H-pyrimido(5,4-b)(1,4)benzoxazin-2(3H)-one), phenothiazine cytidine (1H-pyrimido(5,4-b)(1,4)benzothiazin-2(3H)-one), G-clamps such as a substituted phenoxazine cytidine (e.g. 9-(2-aminoethoxy)-H-pyrimido(5,4-(b) (1,4)benzoxazin-2(3H)-one), carbazole cytidine (2H-pyrimido(4,5-b)indol-2-one), pyridoindole cytidine (H-pyrido(3′,2′:4,5)pyrrolo(2,3-d)pyrimidin-2-one).

[0677] Heterocyclic base moieties may also include those in which the purine or pyrimidine base is replaced with other heterocycles, for example 7-deaza-adenine, 7-deazaguanosine, 2-aminopyridine and 2-pyridone. Further nucleobases include those disclosed in U.S. Pat. No. 3,687,808, those disclosed in The Concise Encyclopedia Of Polymer Science And Engineering, pages 858-859, Kroschwitz, J. I., ed. John Wiley & Sons, 1990, those disclosed by Englisch et al., Angewandte Chemie, International Edition, 1991, 30, 613, and those disclosed by Sanghvi, Y. S., Chapter 15, Antisense Research and Applications, pages 289-302, Crooke, S. T. and Lebleu, B., ed., CRC Press, 1993. Certain of these nucleobases are useful for increasing the binding affinity of an oligomeric compound. These include 5-substituted pyrimidines, 6-azapyrimidines and N-2, N-6 and O-6 substituted purines, including 2-aminopropyladenine, 5-propynyluracil and 5-propynylcytosine. 5-methylcytosine substitutions have been shown to increase nucleic acid duplex stability by 0.6-1.2° C. (Sanghvi et al., eds., Antisense Research and Applications, CRC Press, Boca Raton, 1993, pp. 276-278) and are suitable base substitutions, e.g., when combined with 2′-O-methoxyethyl sugar modifications.

[0678] Conjugates

[0679] Another possible modification of a subject nucleic acid involves chemically linking to the polynucleotide one or more moieties or conjugates which enhance the activity, cellular distribution or cellular uptake of the oligonucleotide. These moieties or conjugates can include conjugate groups covalently bound to functional groups such as primary or secondary hydroxyl groups. Conjugate groups include, but are not limited to, intercalators, reporter molecules, polyamines, polyamides, polyethylene glycols, polyethers, groups that enhance the pharmacodynamic properties of oligomers, and groups that enhance the pharmacokinetic properties of oligomers. Suitable conjugate groups include, but are not limited to, cholesterols, lipids, phospholipids, biotin, phenazine, folate, phenanthridine, anthraquinone, acridine, fluoresceins, rhodamines, coumarins, and dyes. Groups that enhance the pharmacodynamic properties include groups that improve uptake, enhance resistance to degradation, and/or strengthen sequence-specific hybridization with the target nucleic acid. Groups that enhance the pharmacokinetic properties include groups that improve uptake, distribution, metabolism or excretion of a subject nucleic acid.

[0680] Conjugate moieties include but are not limited to lipid moieties such as a cholesterol moiety (Letsinger et al., Proc. Natl. Acad. Sci. USA, 1989, 86, 6553-6556), cholic acid (Manoharan et al., Bioorg. Med. Chem. Let., 1994, 4, 1053-1060), a thioether, e.g., hexyl-S-tritylthiol (Manoharan et al., Ann. N.Y. Acad. Sci., 1992, 660, 306-309; Manoharan et al., Bioorg. Med. Chem. Let., 1993, 3, 2765-2770), a thiocholesterol (Oberhauser et al., Nucl. Acids Res., 1992, 20, 533-538), an aliphatic chain, e.g., dodecandiol or undecyl residues (Saison-Behmoaras et al., EMBO J., 1991, 10, 1111-1118; Kabanov et al., FEBS Lett., 1990, 259, 327-330; Svinarchuk et al., Biochimie, 1993, 75, 49-54), a phospholipid, e.g., di-hexadecyl-rac-glycerol or triethylammonium 1,2-di-O-hexadecyl-rac-glycero-3-H-phosphonate (Manoharan et al., Tetrahedron Lett., 1995, 36, 3651-3654; Shea et al., Nucl. Acids Res., 1990, 18, 3777-3783), a polyamine or a polyethylene glycol chain (Manoharan et al., Nucleosides & Nucleotides, 1995, 14, 969-973), or adamantane acetic acid (Manoharan et al., Tetrahedron Lett., 1995, 36, 3651-3654), a palmityl moiety (Mishra et al., Biochim. Biophys. Acta, 1995, 1264, 229-237), or an octadecylamine or hexylamino-carbonyl-oxycholesterol moiety (Crooke et al., J. Pharmacol. Exp. Ther., 1996, 277, 923-937.

[0681] A conjugate may include a “Protein Transduction Domain” or PTD (also known as a CPP—cell penetrating peptide), which may refer to a polypeptide, polynucleotide, carbohydrate, or organic or inorganic compound that facilitates traversing a lipid bilayer, micelle, cell membrane, organelle membrane, or vesicle membrane. A PTD attached to another molecule, which can range from a small polar molecule to a large macromolecule and/or a nanoparticle, facilitates the molecule traversing a membrane, for example going from extracellular space to intracellular space, or cytosol to within an organelle. In some cases, a PTD attached to another molecule facilitates entry of the molecule into the nucleus (e.g., in some cases, a PTD includes a nuclear localization signal). In some embodiments, a PTD is covalently linked to the amino terminus of an exogenous polypeptide (e.g., a Cas9 protein). In some embodiments, a PTD is covalently linked to the carboxyl terminus of an exogenous polypeptide (e.g., a Cas9 protein). In some embodiments, a PTD is covalently linked to the amino terminus and to the carboxyl terminus of an exogenous polypeptide (e.g., a Cas9 protein). In some embodiments, a PTD is covalently linked to a nucleic acid (e.g., a Cas9 guide RNA, a polynucleotide encoding a Cas9 guide RNA, a polynucleotide encoding a Cas9 protein, etc.). Exemplary PTDs include but are not limited to a minimal undecapeptide protein transduction domain (corresponding to residues 47-57 of HIV-1 TAT comprising YGRKKRRQRRR; SEQ ID NO:264); a polyarginine sequence comprising a number of arginines sufficient to direct entry into a cell (e.g., 3, 4, 5, 6, 7, 8, 9, 10, or 10-50 arginines); a VP22 domain (Zender et al. (2002) Cancer Gene Ther. 9(6):489-96); an Drosophila Antennapedia protein transduction domain (Noguchi et al. (2003) Diabetes 52(7):1732-1737); a truncated human calcitonin peptide (Trehin et al. (2004) Pharm. Research 21:1248-1256); polylysine (Wender et al. (2000) Proc. Natl. Acad. Sci. USA 97:13003-13008); RRQRRTSKLMKR (SEQ ID NO:265); Transportan GWTLNSAGYLLGKINLKALAALAKKIL (SEQ ID NO:266); KALAWEAKLAKALAKALAKHLAKALAKALKCEA (SEQ ID NO:267); and RQIKIWFQNRRMKWKK (SEQ ID NO:268). Exemplary PTDs include but are not limited to, YGRKKRRQRRR (SEQ ID NO:264), RKKRRQRRR (SEQ ID NO:269); an arginine homopolymer of from 3 arginine residues to 50 arginine residues; Exemplary PTD domain amino acid sequences include, but are not limited to, any of the following: YGRKKRRQRRR (SEQ ID NO:264); RKKRRQRR (SEQ ID NO:270); YARAAARQARA (SEQ ID NO:271); THRLPRRRRRR (SEQ ID NO:272); and GGRRARRRRRR (SEQ ID NO:273). In some embodiments, the PTD is an activatable CPP (ACPP) (Aguilera et al. (2009) Integr Biol (Camb) June; 1(5-6): 371-381). ACPPs comprise a polycationic CPP (e.g., Arg9 or “R9”) connected via a cleavable linker to a matching polyanion (e.g., Glu9 or “E9”), which reduces the net charge to nearly zero and thereby inhibits adhesion and uptake into cells. Upon cleavage of the linker, the polyanion is released, locally unmasking the polyarginine and its inherent adhesiveness, thus “activating” the ACPP to traverse the membrane.

### ADDITIONAL EXAMPLES

[0682] Additional targeters, activators, Cas9 proteins (including variant Cas9 proteins), Cas9 guide RNAs, and methods of using the same, can be found in the literature (see, for example, Chylinski et al., RNA Biol. 2013 May; 10(5):726-37; Jinek et al., Science. 2012 Aug. 17; 337(6096):816-21; Ma et al., Biomed Res Int. 2013; 2013:270805; Hou et al., Proc Natl Acad Sci USA. 2013 Sep. 24; 110(39):15644-9; Jinek et al., Elife. 2013; 2:e00471; Pattanayak et al., Nat Biotechnol. 2013 September; 31(9):839-43; Qi et al, Cell. 2013 Feb. 28; 152(5):1173-83; Wang et al., Cell. 2013 May 9; 153(4):910-8; Auer et. al., Genome Res. 2013 Oct. 31; Chen et. al., Nucleic Acids Res. 2013 Nov. 1; 41(20):e19; Cheng et. al., Cell Res. 2013 October; 23(10):1163-71; Cho et. al., Genetics. 2013 November; 195(3):1177-80; DiCarlo et al., Nucleic Acids Res. 2013 April; 41(7):4336-43; Dickinson et. al., Nat Methods. 2013 October; 10(10):1028-34; Ebina et. al., Sci Rep. 2013; 3:2510; Fujii et. al, Nucleic Acids Res. 2013 Nov. 1; 41(20):e187; Hu et. al., Cell Res. 2013 November; 23(11):1322-5; Jiang et. al., Nucleic Acids Res. 2013 Nov. 1; 41(20):e188; Larson et. al., Nat Protoc. 2013 November; 8(11):2180-96; Mali et. at., Nat Methods. 2013 October; 10(10):957-63; Nakayama et. al., Genesis. 2013 December; 51(12):835-43; Ran et. al., Nat Protoc. 2013 November; 8(11):2281-308; Ran et. al., Cell. 2013 Sep. 12; 154(6):1380-9; Upadhyay et. al., G3 (Bethesda). 2013 Dec. 9; 3(12):2233-8; Walsh et. al., Proc Natl Acad Sci USA. 2013 Sep. 24; 110(39):15514-5; Xie et. al., Mol Plant. 2013 Oct. 9; Yang et. al., Cell. 2013 Sep. 12; 154(6):1370-9; and U.S. patents and patent applications: U.S. Pat. Nos. 8,906,616; 8,895,308; 8,889,418; 8,889,356; 8,871,445; 8,865,406; 8,795,965; 8,771,945; 8,697,359; 20140068797; 20140170753; 20140179006; 20140179770; 20140186843; 20140186919; 20140186958; 20140189896; 20140227787; 20140234972; 20140242664; 20140242699; 20140242700; 20140242702; 20140248702; 20140256046; 20140273037; 20140273226; 20140273230; 20140273231; 20140273232; 20140273233; 20140273234; 20140273235; 20140287938; 20140295556; 20140295557; 20140298547; 20140304853; 20140309487; 20140310828; 20140310830; 20140315985; 20140335063; 20140335620; 20140342456; 20140342457; 20140342458; 20140349400; 20140349405; 20140356867; 20140356956; 20140356958; 20140356959; 20140357523; 20140357530; 20140364333; and 20140377868; all of which are hereby incorporated by reference in their entirety.

[0683] Methods

[0684] The present disclosure provides methods for labeling a single stranded target nucleic acid. Generally, a subject method of labeling involves contacting a single stranded target nucleic acid with (e.g., by introducing into a cell) a subject quenched PAMmer, a Cas9 guide RNA, and a Cas9 protein (e.g., a Cas9 protein that cleaves both the quenched PAMmer and the target nucleic acid, e.g,. a wild type Cas9 protein; a variant Cas9 protein, a variant Cas9 protein with reduced nuclease activity; a variant Cas9 protein that cleaves the PAMmer but does not cleave the target nucleic acid; a Cas9 heterodimer, etc.). In some cases, the quenched PAMmer has a specificity segment and does not have an orientation segment. In some cases, the quenched PAMmer has an orientation segment and does not have a specificity segment. In some cases, the quenched PAMmer has a specificity segment and an orientation segment.

[0685] In performing the subject methods, one can bias the cleavage activity of the Cas9 protein to avoid cleaving the target sequence present in DNA within the sample (e.g., the target sequence present in the genome of a cell) by selecting a target sequence where the target sequence does not have an adjacent PAM sequence in the DNA (e.g., in the genome). In such a scenario, the PAM sequence would be provided by the quenched PAMmer, heavily biasing cleavage toward the single stranded target nucleic acid (e.g., a target RNA) and away from the DNA encoding the target nucleic acid. For example, if a subject method is used to label an mRNA in a living cell, and it is therefore desirable to avoid cleaving the DNA within the genome that encodes the mRNA, one can select the target sequence within the mRNA such that the corresponding sequence within the DNA does not have an adjacent PAM sequence. In such a scenario, the PAM sequence provided by the PAMmer would not hybridize with the target nucleic acid (e.g,. see FIG. 8G, FIG. 8H, FIG. 8I, and FIG. 30).

[0686] In some embodiments of the subject methods, the target nucleic acid is outside of a cell. In some embodiments of the subject methods, the target nucleic acid is inside of a cell (which can be referred to as a “host cell” or a “target cell”). In some cases, the method involves contacting a cell with (e.g., introducing into a cell) a subject quenched PAMmer and/or a Cas9 guide RNA (or a nucleic acid encoding the same), and/or Cas9 protein (or a nucleic acid encoding the same). In some embodiments of the subject methods, the host cell provides one or more of the components (e.g., the cell can be genetically modified to express a Cas9 protein and/or a Cas9 guide RNA (or a component of a Cas9 dual guide RNA)). In some such cases, the methods therefore include adding those components not provided by the host cell. As an illustrative example, if the host cell is genetically modified to express a Cas9 protein, the method can include introducing into the cell a Cas9 guide RNA (or a nucleic acid encoding the guide RNA) and/or a quenched PAMmer (which would therefore constitute a method of contacting a target nucleic acid with a Cas9 protein, a Cas9 guide RNA, and a quenched PAMmer).

[0687] As discussed above, a Cas9 guide RNA and a Cas9 protein form a complex. The guide RNA provides target specificity to the complex by comprising a nucleotide sequence that is complementary to a sequence of a target nucleic acid. The Cas9 protein of the complex provides the site-specific activity. When the target nucleic acid is a single stranded target nucleic acid, a quenched PAMmer provides a PAM sequence that activates the Cas9 protein. In some embodiments, a subject complex cleaves the quenched PAMmer. In some embodiments, a subject complex cleaves the quenched PAMmer but does not cleave the target nucleic acid (e.g., when using a Cas9 protein that cleaves the non-complementary strand but does not cleave the complementary strand). In some embodiments, a subject complex cleaves the quenched PAMmer and cleaves the target nucleic acid.

[0688] In some embodiments, a subject complex cleaves the quenched PAMmer, does not cleave the target nucleic acid (e.g., when using a Cas9 protein that cleaves the non-complementary strand but does not cleave the complementary strand), but does modify the target nucleic acid (e.g., when using a Cas9 fusion protein that is fused to a heterologous protein that provides an activity for modifying a target nucleic acid). In some embodiments, a subject complex cleaves the quenched PAMmer, cleaves the target nucleic acid, and additionally modifies the target nucleic acid (e.g., when using a Cas9 fusion protein that is fused to a heterologous protein that provides an activity for modifying a target nucleic acid).

[0689] In some cases, the Cas9 protein exhibits nuclease activity that cleaves target nucleic acid at a target nucleic acid sequence (target site) defined by: (i) the region of complementarity between the guide RNA and the target nucleic acid; and/or (ii) the region of complementarity between the target nucleic acid and the orientation segment of the quenched PAMmer. A Cas9 protein is activated by the presence of a PAM sequence adjacent to the target site and a single stranded target nucleic acid does not have a PAM sequence. As defined and discussed above, a subject PAMmer facilitates the cleavage of a single stranded target nucleic acid by providing a PAM sequence (anchored into an appropriate position by the orientation segment and/or the specificity segment of the PAMmer, see FIG. 8).

[0690] In some cases where the Cas9 protein is a Cas9 heterodimer, a subject method can be performed using a truncated Cas9 guide RNA and can be performed in the presence of an appropriate dimerizing agent (as described above). Thus, in some cases where the Cas9 protein is a Cas9 heterodimer, a subject method includes contacting a target nucleic acid with a dimerizing agent and a truncated Cas9 guide RNA in addition to the other components (e.g., quenched PAMmer). In some cases where the Cas9 protein is a Cas9 heterodimer, a subject method includes contacting a target nucleic acid with a system and/or a composition the comprises a dimerizing agent and a truncated Cas9 guide RNA in addition to the other components (e.g., quenched PAMmer).

[0691] In some embodiments, a method of labeling can be used to visualize the target nucleic acid (e.g., visualize the subcellular distribution of a target nucleic acid). In addition to the quenched PAMmer, any one of the components (e.g., the Cas9 protein, the Cas9 guide RNA) can be detectably labeled (i.e., can have an indirect and/or direct label moiety, defined above). The term “detectable label” includes directly and/or indirectly detectable labels. In some cases, a Cas9 protein and/or Cas9 guide RNA can have a label moiety that can be indirectly detected (an RNA aptamer, a nucleic acid sequence that is bound by a labeled protein, biotin, etc.) and/or directly detected (e.g., a fluorescent dye).

[0692] A method for labeling a single-stranded target nucleic acid according to the present disclosure finds use in a variety of applications, which are also provided. Applications include research applications; diagnostic applications; industrial applications; and treatment applications. Applications include, e.g., determining the amount (e.g., in a target cell, in a biological sample, etc.) of a target nucleic acid (e.g., mRNA, tRNA, rRNA, microRNA, ncRNA, lncRNA, etc.) (e.g., in some cases two or more, three or more, four or more, five or more , etc. different single stranded target nucleic acids). For example, an amount of a target nucleic acid can be determined in a sample (e.g., a clinical sample, either within cells or extracellular) by contacting the target nucleic acid with a Cas9 protein, a Cas9 guide RNA, and a quenched PAMmer, and quantifying the amount of target nucleic acid by quantifying the signal from the detectable label (e.g, via flow cytometry, microscopy, etc.). For example, such a method can include (i) contacting a sample having the target nucleic acid with a quenched PAMmer, a Cas9 guide RNA, and a Cas9 protein; and (ii) detecting the presence or absence of the detectable label (e.g., measuring/detecting signal from the detectable label). Such methods can be useful for measuring the amount of the target nucleic acid (quantitative) and can also be useful for determining presence/absence of the target nucleic acid (qualitative) and/or determining whether the target nucleic acid is present above or below a threshold amount (quantitative/qualitative).

[0693] As noted above, contacting a target nucleic acid, e.g., when the nucleic acid is in a cell, can be achieved by introducing the components (Cas9 protein, Cas9 guide RNA, quenched PAMmer) into the cell and/or by introducing one or more nucleic acids encoding one or more of the components into the cell. Thus, in some cases, a subject method is a method of quantifying the amount of a target nucleic acid in a sample (e.g., in a cellular sample, in a cell, in a fixed cell, in a living cell, etc.).

[0694] Applications also include the visualization and/or subcellular localization of specific single stranded target nucleic acids (e.g., in real time in living cells, or in fixed cells) (e.g., multi-color RNA imaging inside of a cell). Such methods can be used for drug discovery and target validation (e.g, a candidate drug may alter the amount of and/or subcellular localization of a target nucleic acid). High through-put analysis can be carried out using a subject labeling method (e.g., on a genomic scale).

[0695] For all of the methods that utilize a quenched PAMmer (e.g, all of the above methods/applications disclose herein), the methods can be used for diagnostic purposes. For all of the methods that utilize a quenched PAMmer (e.g, all of the above methods/applications disclose herein), an appropriate Cas9 can be chosen for a desired purpose. For example, a Cas9 fusion protein can be used that cleaves the quenched PAMmer but modifies the target nucleic acid in another way (e.g., methylation), and the resulting modified target nucleic acid can be imaged/visualized/quantified/tracked, etc.

[0696] For all of the methods that utilize a quenched PAMmer (e.g, all of the above methods/applications disclose herein), multiple different target nucleic acids can be quantified/tracked/labeled/visualized/imaged (e.g., simultaneously), by for example, using PAMmers and Cas9 guide RNAs that target different target nucleic acids and where different PAMmers have detectable labels that are distinguishable from one another.

[0697] In some instances, one or more components (e.g, a target nucleic acid, a quenched PAMmer, a Cas9 guide RNA, and/or a Cas9 protein) is labeled with (e.g., linked to) a donor molecule, while another component is labeled with (e.g., linked to) an acceptor molecule, and detection of an association between the labeled components is by fluorescence resonance energy transfer (also referred to as “Förster resonance energy transfer” or “FRET”).

[0698] In some instances, one or more components (e.g, a target nucleic acid, a PAMmer, a Cas9 guide RNA, and/or a Cas9 protein) is labeled with (e.g., linked to, fused with, bound by, etc.) a first member of a split fluorophore, while another component is labeled with (e.g., linked to, fused with, bound by, etc.) a second member of a split fluorophore, and detection of the fluorophore can occur when the first and second split fluorophores are brought into close proximity. For example, in some cases, a Cas9 protein (or a Cas9 guide RNA) can be labeled with a first member of a split fluorophore and the corresponding PAMmer can be labeled with a second member of the split fluorophore such that, when the Cas9/guide RNA complex is brought into close proximity to the corresponding PAMmer (which occurs when both are binding to (associated with) the target nucleic acid), a signal can be detected. Any convenient split fluorophore can be used. For more information related to split fluorophores (e.g, a split-GFP), refer to Cabantous et al., Sci Rep. 2013 Oct. 4; 3:2854. doi: 10.1038/srep02854, which is hereby incorporated by reference in its entirety.

[0699] A subject method can be used for detection (e.g., ultra-low background detection) and/or imaging of endogenous and/or exogenous (e.g., viral or pathogen) single stranded target nucleic acids (e.g., DNAs, RNAs). Many current technologies (e.g. fluorescent proteins tethered to RNA-binding proteins) suffer from high background and subsequent false positive signals due to the fluorescence output not being tightly controlled by target binding, and while other current technologies have provided improvements in attempt to overcome this problem (e.g. molecular beacons), they still suffer from background and false positive signals owing to the random ‘opening’ of these molecules when in their unbound state and when bound at off-target sites.

[0700] Methods of Treatment

[0701] In some cases, a subject method of labeling is a method of treating. For example, a Cas9 protein can be used to cleave a target nucleic acid (e.g., a viral DNA or RNA, a particular endogenous mRNA, etc. as described elsewhere) in addition to the quenched PAMmer, and the subject method would therefore label the cleaved target nucleic acid. Furthermore, a signal would only be detected upon cleavage, so one could monitor the cleavage of the target nucleic acid because detection of signal could be used as a reporter that cleavage of the target nucleic acid has occurred.

[0702] As another example, a variant Cas9 protein (e.g., Cas9 fusion protein) can be used to modify (e.g., methylate etc. as described elsewhere) a target nucleic acid (e.g., a viral DNA or RNA, a particular endogenous mRNA, etc. as described elsewhere) in addition to cleaving the quenched PAMmer (in order to label the target nucleic acid), and the subject method would therefore label the modified target nucleic acid. A signal would only be detected upon cleavage of the quenched PAMmer, so one could monitor modification of the target nucleic acid because detection of signal could be used as a reporter that cleavage of the quenched PAMmer, and simultaneously modification of the target nucleic acid, has occurred.

[0703] In some cases, where the method is a method of treatment, a pharmaceutical preparation (as described below) can be administered to an individual. Such preparations can include a quenched PAMmer, and/or guide RNA (or nucleic acid encoding the same), and/or Cas9 protein (or nucleic acid encoding the same).

[0704] Multiple Guide RNAs and/or PAMmers

[0705] In some embodiments, multiple guide RNAs and multiple PAMmers are used to simultaneously label multiple different target nucleic acids or multiple different locations on the same target nucleic. For example, in some cases, a subject labeling method involves use of: a) a first Cas9 guide RNA targeting a first target nucleic acid, and a first quenched PAMmer comprising a first detectable label; and b) a second guide RNA targeting a second target nucleic acid (or a second target sequence of the first target nucleic acid) having a nucleotide sequence that differs from the first target nucleic acid, and a second quenched PAMmer comprising a second detectable label that is distinguishable from the first detectable label. Each targeting pair (a quenched PAMmer and a Cas9 guide RNA) can have a detectable label that is distinguishable from another targeting pair, and thus, multiple different target nucleic acids can be simultaneously labeled (e.g., quantified/visualized/imaged, etc.). In some embodiments, two or more guide RNAs (and quenched PAMmers) target the same gene or transcript or locus. In some embodiments, two or more guide RNAs (and quenched PAMmers) target different unrelated target nucleic acids. In some embodiments, two or more guide RNAs (and quenched PAMmers) target different, but related target nucleic acids. In some cases, the quenched PAMmer(s) can be introduced directly (e.g, transfected into a cell).

[0706] To express multiple guide RNAs (and/or PAMmers), an artificial RNA processing system mediated by a Csy4 endoribonuclease can be used. Multiple guide RNAs can be concatenated into a tandem array on a precursor transcript (e.g., expressed from a U6 promoter), and separated by Csy4-specific RNA sequence. Co-expressed Csy4 protein cleaves the precursor transcript into multiple guide RNAs (and/or PAMmers). Advantages for using an RNA processing system include: first, there is no need to use multiple promoters; second, since all guide RNAs (and/or PAMmers) are processed from a precursor transcript, their concentrations are normalized for similar Cas9-binding.

[0707] Csy4 is a small endoribonuclease (RNase) protein derived from bacteria Pseudomonas aeruginosa. Csy4 specifically recognizes a minimal 17-bp RNA hairpin, and exhibits rapid (<1 min) and highly efficient (>99.9% or more) RNA cleavage. Unlike most RNases, the cleaved RNA fragment remains stable and functionally active. The Csy4-based RNA cleavage can be repurposed into an artificial RNA processing system. In this system, the 17-bp RNA hairpins are inserted between multiple RNA fragments that are transcribed as a precursor transcript from a single promoter. Co-expression of Csy4 is effective in generating individual RNA fragments.

[0708] In some embodiments (e.g., in some cases where the Cas9 protein is a chimeric Cas9 protein), a subject complex modifies a target polypeptide associated with target nucleic acid (e.g., a histone, a DNA-binding protein, an RNA-binding protein, an RNA editing protein etc.), leading to, for example, protein methylation, protein acetylation, protein ubiquitination, and the like. The target nucleic acid may be, for example, a single stranded nucleic acid outside of a cell in vitro, a single stranded nucleic acid inside of a cell in vitro, a single stranded nucleic acid inside of a cell ex vivo, or a single stranded nucleic acid inside of a cell in vivo.

[0709] In some cases, different Cas9 proteins (i.e., Cas9 proteins from various species) may be advantageous to use in the various provided methods in order to capitalize on various enzymatic characteristics of the different Cas9 proteins (e.g., for different PAM sequence preferences; for increased or decreased enzymatic activity; for an increased or decreased level of cellular toxicity; etc.). Cas9 proteins from various species (see SEQ ID NOs:1-256 and 795-1346) may require different PAM sequences. Thus, for a particular Cas9 protein of choice, the PAM sequence requirement may be different than the PAM sequences described above (e.g., 5′-NGG-3′, GG, etc.).

[0710] In some cases, the Cas9 protein has enzymatic activity that modifies target nucleic acid in ways other than introducing strand cleavage. Enzymatic activity of interest that may be used to modify target nucleic acid (e.g., by fusing a heterologous polypeptide with enzymatic activity to a Cas9 protein, thereby generating a chimeric Cas9 protein) includes, but is not limited methyltransferase activity, demethylase activity, DNA repair activity, DNA damage activity, deamination activity, dismutase activity, alkylation activity, depurination activity, oxidation activity, pyrimidine dimer forming activity, integrase activity, transposase activity, recombinase activity, polymerase activity, ligase activity, helicase activity, photolyase activity or glycosylase activity).

[0711] In some cases, the Cas9 protein has activity that modulates the production of a protein encoded by a single stranded target nucleic acid (e.g., mRNA) (e.g., by cleaving the mRNA). In some cases, the subject method is used to cleave a targeted coding-RNA (protein-encoding gene) and/or a targeted non-coding RNA (e.g., tRNA, rRNA, snoRNA, siRNA, miRNA, long ncRNA, etc.).

[0712] In some cases, the Cas9 protein has enzymatic activity that modifies a polypeptide associated with a target nucleic acid (e.g. a histone, a DNA-binding protein, an RNA-binding protein, an RNA editing protein and the like). In some embodiments, the enzymatic activity is methyltransferase activity, demethylase activity, acetyltransferase activity, deacetylase activity, kinase activity, phosphatase activity, ubiquitin ligase activity (i.e., ubiquitination activity), deubiquitinating activity, adenylation activity, deadenylation activity, SUMOylating activity, deSUMOylating activity, ribosylation activity, deribosylation activity, myristoylation activity, demyristoylation activity glycosylation activity (e.g., from O-GlcNAc transferase) or deglycosylation activity. The enzymatic activities listed herein catalyze covalent modifications to proteins. Such modifications are known in the art to alter the stability or activity of the target protein (e.g., phosphorylation due to kinase activity can stimulate or silence protein activity depending on the target protein).

[0713] Target Cells of Interest

[0714] A target nucleic acid can be located anywhere, for example, outside of a cell in vitro (e.g., in a biological sample), inside of a cell in vitro (in a biological sample), inside of a cell in vivo, inside of a cell ex vivo (e.g., in a biological sample). Suitable target cells (which can comprise target nucleic acids) include, but are not limited to: a bacterial cell; an archaeal cell; a cell of a single-cell eukaryotic organism; a plant cell; an algal cell, e.g., Botryococcus braunii, Chlamydomonas reinhardtii, Nannochloropsis gaditana, Chlorella pyrenoidosa, Sargassum patens C. Agardh, and the like; a fungal cell (e.g., a yeast cell); an animal cell; a cell from an invertebrate animal (e.g. fruit fly, cnidarian, echinoderm, nematode, etc.); a cell from a vertebrate animal (e.g., fish, amphibian, reptile, bird, mammal); a cell from a mammal (e.g., a cell from a rodent, a cell from a human, etc.); and the like. Any type of cell may be of interest (e.g. a stem cell, e.g. an embryonic stem (ES) cell, an induced pluripotent stem (iPS) cell, a germ cell (e.g., an oocyte, a sperm, an oogonia, a speratogonia, etc.), a somatic cell, e.g. a fibroblast, a hematopoietic cell, a neuron, a muscle cell, a bone cell, a hepatocyte, a pancreatic cell; an in vitro or in vivo embryonic cell of an embryo at any stage, e.g., a 1-cell, 2-cell, 4-cell, 8-cell, etc. stage zebrafish embryo; etc.). Cells may be from established cell lines or they may be primary cells, where “primary cells”, “primary cell lines”, and “primary cultures” are used interchangeably herein to refer to cells and cells cultures that have been derived from a subject and allowed to grow in vitro for a limited number of passages, i.e. splittings, of the culture. For example, primary cultures are cultures that may have been passaged 0 times, 1 time, 2 times, 4 times, 5 times, 10 times, or 15 times, but not enough times go through the crisis stage. Typically, the primary cell lines are maintained for fewer than 10 passages in vitro. Target cells can be unicellular organisms and/or can be grown in culture. If the cells are primary cells, they may be harvest from an individual by any convenient method. For example, leukocytes may be conveniently harvested by apheresis, leukocytapheresis, density gradient separation, etc., while cells from tissues such as skin, muscle, bone marrow, spleen, liver, pancreas, lung, intestine, stomach, etc. can be conveniently harvested by biopsy.

[0715] In some of the above applications, the subject methods may be employed to label a target nucleic acid (e.g., for visualization, for quantification, etc.) in mitotic or post-mitotic cells in vivo and/or ex vivo and/or in vitro (e.g., for diagnostic purposes, for research purposes, etc.). Because the guide RNA provides specificity by hybridizing to target nucleic acid, a mitotic and/or post-mitotic cell of interest in the disclosed methods may include a cell from any organism (e.g. a bacterial cell, an archaeal cell, a cell of a single-cell eukaryotic organism, a plant cell, an algal cell, e.g., Botryococcus braunii, Chlamydomonas reinhardtii, Nannochloropsis gaditana, Chlorella pyrenoidosa, Sargassum patens C. Agardh, and the like, a fungal cell (e.g., a yeast cell), an animal cell, a cell from an invertebrate animal (e.g. fruit fly, cnidarian, echinoderm, nematode, etc.), a cell from a vertebrate animal (e.g., fish, amphibian, reptile, bird, mammal), a cell from a mammal, a cell from a rodent, a cell from a human, etc.).

[0716] Any type of cell may be of interest (e.g. a stem cell, e.g. an embryonic stem (ES) cell, an induced pluripotent stem (iPS) cell, a germ cell; a somatic cell, e.g. a fibroblast, a hematopoietic cell, a neuron, a muscle cell, a bone cell, a hepatocyte, a pancreatic cell; an in vitro or in vivo embryonic cell of an embryo at any stage, e.g., a 1-cell, 2-cell, 4-cell, 8-cell, etc. stage zebrafish embryo; etc.). Cells may be from established cell lines or they may be primary cells, where “primary cells”, “primary cell lines”, and “primary cultures” are used interchangeably herein to refer to cells and cells cultures that have been derived from a subject and allowed to grow in vitro for a limited number of passages, i.e. splittings, of the culture. For example, primary cultures are cultures that may have been passaged 0 times, 1 time, 2 times, 4 times, 5 times, 10 times, or 15 times, but not enough times go through the crisis stage. In some cases, the primary cell lines are maintained for fewer than 10 passages in vitro. Target cells are in many embodiments unicellular organisms, or are grown in culture.

[0717] If the cells are primary cells, they may be harvest from an individual by any convenient method. For example, leukocytes may be conveniently harvested by apheresis, leukocytapheresis, density gradient separation, etc., while cells from tissues such as skin, muscle, bone marrow, spleen, liver, pancreas, lung, intestine, stomach, etc. are most conveniently harvested by biopsy. An appropriate solution may be used for dispersion or suspension of the harvested cells. Such solution will generally be a balanced salt solution, e.g. normal saline, phosphate-buffered saline (PBS), Hank's balanced salt solution, etc., conveniently supplemented with fetal calf serum or other naturally occurring factors, in conjunction with an acceptable buffer at low concentration, generally from 5-25 mM. Convenient buffers include HEPES, phosphate buffers, lactate buffers, etc. The cells may be used immediately, or they may be stored, frozen, for long periods of time, being thawed and capable of being reused. In such cases, the cells will usually be frozen in 10% or more DMSO, 50% or more serum, and about 40% buffered medium, or some other such solution as is commonly used in the art to preserve cells at such freezing temperatures, and thawed in a manner as commonly known in the art for thawing frozen cultured cells.

[0718] Introducing Components into a Target Cell

[0719] A Cas9 guide RNA (or a nucleic acid comprising a nucleotide sequence encoding same), a PAMmer (or a nucleic acid comprising a nucleotide sequence encoding same), and/or a Cas9 protein (or a nucleic acid comprising a nucleotide sequence encoding same) can be introduced into a host cell by any of a variety of well-known methods. Similarly, where a subject method involves introducing into a host cell a nucleic acid comprising a nucleotide sequence encoding a variant Cas9 protein, such a nucleic acid can be introduced into a host cell by any of a variety of well-known methods.

[0720] Methods of introducing a nucleic acid into a host cell are known in the art, and any known method can be used to introduce a nucleic acid (e.g., an expression construct) into a stem cell or progenitor cell. Suitable methods include, include e.g., viral or bacteriophage infection, transfection, conjugation, protoplast fusion, lipofection, electroporation, calcium phosphate precipitation, polyethyleneimine (PEI)-mediated transfection, DEAE-dextran mediated transfection, liposome-mediated transfection, particle gun technology, calcium phosphate precipitation, direct micro injection, nanoparticle-mediated nucleic acid delivery (see, e.g., Panyam et., al Adv Drug Deliv Rev. 2012 Sep. 13. pii: S0169-409X(12)00283-9. doi: 10.1016/j.addr.2012.09.023), and the like.

[0721] For methods of labeling a single stranded target nucleic acid, in some cases, the Cas9 protein is provided as a nucleic acid (e.g., an mRNA, a DNA, a plasmid, an expression vector, etc.) that encodes the Cas9 protein. In some cases, the Cas9 protein is provided directly as a protein. As one non-limiting example, fungi (e.g., yeast) can be transformed with exogenous protein and/or nucleic acid using spheroplast transformation (see Kawai et al., Bioeng Bugs. 2010 November-December; 1(6):395-403: “Transformation of Saccharomyces cerevisiae and other fungi: methods and possible underlying mechanism”; and Tanka et al., Nature. 2004 Mar. 18; 428(6980):323-8: “Conformational variations in an infectious protein determine prion strain differences”; both of which are herein incorporated by reference in their entirety). Thus, a Cas9 protein (e.g., Cas9) can be incorporated into a spheroplast (with or without nucleic acid encoding a Cas9 guide RNA and with or without a donor polynucleotide) and the spheroplast can be used to introduce the content into a yeast cell. A Cas9 protein can be introduced into a cell (provided to the cell) by any convenient method; such methods are known to those of ordinary skill in the art. As another non-limiting example, a Cas9 protein can be injected directly into a cell (e.g., with or without nucleic acid encoding a Cas9 guide RNA and with or without a donor polynucleotide), e.g., a cell of a zebrafish embryo, the pronucleus of a fertilized mouse oocyte, etc. As another example, a preformed complex of a Cas9 protein and a Cas9 guide RNA (an RNP) can be introduced into a cell via nucleofection.

[0722] Genetically Modified Host Cells

[0723] In some embodiments, a genetically modified host cell has been genetically modified with an exogenous nucleic acid comprising a nucleotide sequence encoding a Cas9 protein (e.g., a naturally occurring Cas9; a modified, i.e., mutated or variant, Cas9; a chimeric Cas9; etc.). Single stranded nucleic acids of the genetically modified host cell can be targeted for modification by introducing into the cell a Cas9 guide RNA (or a DNA encoding a Cas9 guide RNA, which determines the genomic location/sequence to be modified) and a PAMmer (or a nucleic acid encoding a PAMmer). In some embodiments, the nucleotide sequence encoding a Cas9 protein is operably linked to an inducible promoter (e.g., heat shock promoter, Tetracycline-regulated promoter, Steroid-regulated promoter, Metal-regulated promoter, estrogen receptor-regulated promoter, etc.). In some embodiments, the nucleotide sequence encoding a Cas9 protein is operably linked to a spatially restricted and/or temporally restricted promoter (e.g., a tissue specific promoter, a cell type specific promoter, etc.). In some embodiments, the nucleotide sequence encoding a Cas9 protein is operably linked to a constitutive promoter.

[0724] In some embodiments, a subject genetically modified host cell is in vitro. In some embodiments, a subject genetically modified host cell is in vivo. In some embodiments, a subject genetically modified host cell is a prokaryotic cell or is derived from a prokaryotic cell. In some embodiments, a subject genetically modified host cell is a bacterial cell or is derived from a bacterial cell. In some embodiments, a subject genetically modified host cell is an archaeal cell or is derived from an archaeal cell. In some embodiments, a subject genetically modified host cell is a eukaryotic cell or is derived from a eukaryotic cell. In some embodiments, a subject genetically modified host cell is a plant cell or is derived from a plant cell. In some embodiments, a subject genetically modified host cell is an animal cell or is derived from an animal cell. In some embodiments, a subject genetically modified host cell is an invertebrate cell or is derived from an invertebrate cell. In some embodiments, a subject genetically modified host cell is a vertebrate cell or is derived from a vertebrate cell. In some embodiments, a subject genetically modified host cell is a mammalian cell or is derived from a mammalian cell. In some embodiments, a subject genetically modified host cell is a rodent cell or is derived from a rodent cell. In some embodiments, a subject genetically modified host cell is a human cell or is derived from a human cell.

[0725] The present disclosure further provides progeny of a subject genetically modified cell, where the progeny can comprise the same exogenous nucleic acid or polypeptide as the subject genetically modified cell from which it was derived. The present disclosure further provides a composition comprising a subject genetically modified host cell.

[0726] Compositions

[0727] The present disclosure provides a composition comprising a quenched PAMmer and at least one of: a Cas9 guide RNA (or one or more nucleic acids encoding the same) and a Cas9 protein (or nucleic acid encoding the same). In some cases, the Cas9 protein is a variant Cas9 protein. In some cases, the Cas9 protein is a chimeric Cas9 protein (a Cas9 fusion protein). A subject composition is useful for carrying out a method of the present disclosure, e.g., a method for labeling a single stranded target nucleic acid.

[0728] Compositions and Kits Comprising a Quenched PAMmer

[0729] The present disclosure provides compositions and kits comprising a quenched PAMmer and at least one of: a Cas9 guide RNA and a Cas9 protein. The compositions and kits can comprise, in addition, one or more of: a salt, e.g., NaCl, MgCl₂, KCl, MgSO₄, etc.; a buffering agent, e.g., a Tris buffer, N-(2-Hydroxyethyl)piperazine-N′-(2-ethanesulfonic acid) (HEPES), 2-(N-Morpholino)ethanesulfonic acid (MES), MES sodium salt, 3-(N-Morpholino)propanesulfonic acid (MOPS), N-tris[Hydroxymethyl]methyl-3-aminopropanesulfonic acid (TAPS), etc.; a solubilizing agent; a detergent, e.g., a non-ionic detergent such as Tween-20, etc.; a nuclease inhibitor; and the like. For example, in some cases, a subject composition or kit comprises a Cas9 guide RNA and a buffer for stabilizing nucleic acids. In some cases where the Cas9 protein is a Cas9 heterodimer, a subject composition and/or kit can include a dimerizing agent (e.g., an appropriate dimerizing agent that can facilitate dimerization).

[0730] In some embodiments, quenched PAMmer and/or a Cas9 guide RNA and/or a Cas9 protein is present in a subject composition is pure, e.g., 75% or more, 80% or more, 85% or more, 90% or more, 95% or more, 98% or more, 99% or more, or more than 99% or more pure, where “% or more purity” means that guide RNA is the recited percent free from other macromolecules, or contaminants that may be present during the production of the quenched PAMmer and/or a Cas9 guide RNA and/or a Cas9 protein.

[0731] As noted above, in some embodiments, a quenched PAMmer, and/or guide RNA, and/or Cas9 protein are employed to modify single stranded nucleic acid (ssRNA, ssDNA) in vivo, for purposes, e.g. to treat a disease or as an antiviral, antipathogenic, or anticancer therapeutic, or for biological research. In in vivo embodiments, a quenched PAMmer, and/or guide RNA (or nucleic acid encoding the same), and/or Cas9 protein (or nucleic acid encoding the same) can be administered to the individual (as protein, RNA, and/or DNA, as appropriate/convenient). A quenched PAMmer, and/or guide RNA (or nucleic acid encoding the same), and/or Cas9 protein (or nucleic acid encoding the same) may be administered by any of a number of well-known methods in the art for the administration of peptides, small molecules and nucleic acids to a subject. A quenched PAMmer, and/or guide RNA (or nucleic acid encoding the same), and/or Cas9 protein (or nucleic acid encoding the same) can be incorporated into a variety of formulations. A quenched PAMmer, and/or guide RNA (or nucleic acid encoding the same), and/or Cas9 protein (or nucleic acid encoding the same) of the present disclosure can be formulated into pharmaceutical compositions by combination with appropriate pharmaceutically acceptable carriers or diluents.

[0732] Pharmaceutical preparations are compositions that include one or more of a quenched PAMmer, and/or guide RNA (or nucleic acid encoding the same), and/or Cas9 protein (or nucleic acid encoding the same) present in a pharmaceutically acceptable vehicle. “Pharmaceutically acceptable vehicles” may be vehicles approved by a regulatory agency of the Federal or a state government or listed in the U.S. Pharmacopeia or other generally recognized pharmacopeia for use in mammals, such as humans. The term “vehicle” refers to a diluent, adjuvant, excipient, or carrier with which an agent (e.g., one or more of a quenched PAMmer, and/or guide RNA, and/or Cas9 protein) is formulated for administration to a mammal. Such pharmaceutical vehicles can be lipids, e.g. liposomes, e.g. liposome dendrimers; liquids, such as water and oils, including those of petroleum, animal, vegetable or synthetic origin, such as peanut oil, soybean oil, mineral oil, sesame oil and the like, saline; gum acacia, gelatin, starch paste, talc, keratin, colloidal silica, urea, and the like. In addition, auxiliary, stabilizing, thickening, lubricating and coloring agents may be used. Pharmaceutical compositions may be formulated into preparations in solid, semi-solid, liquid or gaseous forms, such as tablets, capsules, powders, granules, ointments, solutions, suppositories, injections, inhalants, gels, microspheres, and aerosols. As such, administration of the a quenched PAMmer, and/or guide RNA (or nucleic acid encoding the same), and/or Cas9 protein (or nucleic acid encoding the same) can be achieved in various ways, including oral, buccal, rectal, parenteral, intraperitoneal, intradermal, transdermal, intratracheal, intraocular, etc., administration. The active agent may be systemic after administration or may be localized by the use of regional administration, intramural administration, or use of an implant that acts to retain the active dose at the site of implantation. The active agent may be formulated for immediate activity or it may be formulated for sustained release.

[0733] For some conditions, particularly central nervous system conditions, it may be necessary to formulate agents to cross the blood-brain barrier (BBB). One strategy for drug delivery through the blood-brain barrier (BBB) entails disruption of the BBB, either by osmotic means such as mannitol or leukotrienes, or biochemically by the use of vasoactive substances such as bradykinin. The potential for using BBB opening to target specific agents to brain tumors is also an option. A BBB disrupting agent can be co-administered with the therapeutic compositions of the present disclosure when the compositions are administered by intravascular injection. Other strategies to go through the BBB may entail the use of endogenous transport systems, including Caveolin-1 mediated transcytosis, carrier-mediated transporters such as glucose and amino acid carriers, receptor-mediated transcytosis for insulin or transferrin, and active efflux transporters such as p-glycoprotein. Active transport moieties may also be conjugated to the therapeutic compounds for use in the methods of the present disclosure, to facilitate transport across the endothelial wall of the blood vessel. Alternatively, drug delivery of therapeutics agents behind the BBB may be by local delivery, for example by intrathecal delivery, e.g. through an Ommaya reservoir (see e.g. U.S. Pat. Nos. 5,222,982 and 5,385,582, incorporated herein by reference); by bolus injection, e.g. by a syringe, e.g. intravitreally or intracranially; by continuous infusion, e.g. by cannulation, e.g. with convection (see e.g. US Application No. 20070254842, incorporated here by reference); or by implanting a device upon which the agent has been reversably affixed (see e.g. US Application Nos. 20080081064 and 20090196903, incorporated herein by reference).

[0734] Typically, an effective amount of a quenched PAMmer, and/or guide RNA (or nucleic acid encoding the same), and/or Cas9 protein (or nucleic acid encoding the same) are provided. As discussed above with regard to ex vivo methods, an effective amount or effective dose of a quenched PAMmer, and/or guide RNA (or nucleic acid encoding the same), and/or Cas9 protein (or nucleic acid encoding the same) in vivo is the amount sufficient to induce a 2 fold (or greater) reduction in the amount of intact target nucleic acid (for methods of cleaving) and/or 2-fold change in the amount of modified target nucleic acid, relative to a negative control (e.g. a cell contacted with an empty vector and/or irrelevant polypeptide). The amount of intact target nucleic acid may be measured by any convenient method, e.g. as described above and known in the art. The calculation of the effective amount or effective dose of a quenched PAMmer, and/or guide RNA (or nucleic acid encoding the same), and/or Cas9 protein (or nucleic acid encoding the same) to be administered is within the skill of one of ordinary skill in the art. The final amount to be administered will be dependent upon the route of administration and upon the nature of the disorder or condition that is to be treated.

[0735] The effective amount given to a particular patient will depend on a variety of factors, several of which will differ from patient to patient. A competent clinician will be able to determine an effective amount of a therapeutic agent to administer to a patient to halt or reverse the progression the disease condition as required. Utilizing LD50 animal data, and other information available for the agent, a clinician can determine the maximum safe dose for an individual, depending on the route of administration. For instance, an intravenously administered dose may be more than an intrathecally administered dose, given the greater body of fluid into which the therapeutic composition is being administered. Similarly, compositions which are rapidly cleared from the body may be administered at higher doses, or in repeated doses, in order to maintain a therapeutic concentration. Utilizing ordinary skill, the competent clinician will be able to optimize the dosage of a particular therapeutic in the course of routine clinical trials.

[0736] For inclusion in a medicament, a quenched PAMmer, and/or guide RNA (or nucleic acid encoding the same), and/or Cas9 protein (or nucleic acid encoding the same) may be obtained from a suitable commercial source. As a general proposition, the total pharmaceutically effective amount of a quenched PAMmer, and/or guide RNA (or nucleic acid encoding the same), and/or Cas9 protein (or nucleic acid encoding the same) administered parenterally per dose will be in a range that can be measured by a dose response curve.

[0737] Therapies based on a quenched PAMmer, and/or guide RNA, and/or Cas9 protein, i.e. preparations of a quenched PAMmer, and/or guide RNA (or nucleic acid encoding the same), and/or Cas9 protein (or nucleic acid encoding the same) to be used for therapeutic administration, must be sterile. Sterility is readily accomplished by filtration through sterile filtration membranes (e.g., 0.2 μm membranes). Therapeutic compositions generally are placed into a container having a sterile access port, for example, an intravenous solution bag or vial having a stopper pierceable by a hypodermic injection needle. The therapies based on a quenched PAMmer, and/or guide RNA (or nucleic acid encoding the same), and/or Cas9 protein (or nucleic acid encoding the same) may be stored in unit or multi-dose containers, for example, sealed ampules or vials, as an aqueous solution or as a lyophilized formulation for reconstitution. As an example of a lyophilized formulation, 10-mL vials are filled with 5 ml of sterile-filtered 1% (w/v) aqueous solution of compound, and the resulting mixture is lyophilized. The infusion solution is prepared by reconstituting the lyophilized compound using bacteriostatic Water-for-Injection.

[0738] Pharmaceutical compositions can include, depending on the formulation desired, pharmaceutically-acceptable, non-toxic carriers of diluents, which are defined as vehicles commonly used to formulate pharmaceutical compositions for animal or human administration. The diluent is selected so as not to affect the biological activity of the combination. Examples of such diluents are distilled water, buffered water, physiological saline, PBS, Ringer's solution, dextrose solution, and Hank's solution. In addition, the pharmaceutical composition or formulation can include other carriers, adjuvants, or non-toxic, nontherapeutic, nonimmunogenic stabilizers, excipients and the like. The compositions can also include additional substances to approximate physiological conditions, such as pH adjusting and buffering agents, toxicity adjusting agents, wetting agents and detergents.

[0739] The composition can also include any of a variety of stabilizing agents, such as an antioxidant for example. When the pharmaceutical composition includes a polypeptide, the polypeptide can be complexed with various well-known compounds that enhance the in vivo stability of the polypeptide, or otherwise enhance its pharmacological properties (e.g., increase the half-life of the polypeptide, reduce its toxicity, enhance solubility or uptake). Examples of such modifications or complexing agents include sulfate, gluconate, citrate and phosphate. The nucleic acids or polypeptides of a composition can also be complexed with molecules that enhance their in vivo attributes. Such molecules include, for example, carbohydrates, polyamines, amino acids, other peptides, ions (e.g., sodium, potassium, calcium, magnesium, manganese), and lipids.

[0740] Further guidance regarding formulations that are suitable for various types of administration can be found in Remington's Pharmaceutical Sciences, Mace Publishing Company, Philadelphia, Pa., 17th ed. (1985). For a brief review of methods for drug delivery, see, Langer, Science 249:1527-1533 (1990).

[0741] The pharmaceutical compositions can be administered for prophylactic and/or therapeutic treatments. Toxicity and therapeutic efficacy of the active ingredient can be determined according to standard pharmaceutical procedures in cell cultures and/or experimental animals, including, for example, determining the LD50 (the dose lethal to 50% of the population) and the ED50 (the dose therapeutically effective in 50% of the population). The dose ratio between toxic and therapeutic effects is the therapeutic index and it can be expressed as the ratio LD50/ED50. Therapies that exhibit large therapeutic indices are preferred.

[0742] The data obtained from cell culture and/or animal studies can be used in formulating a range of dosages for humans. The dosage of the active ingredient typically lines within a range of circulating concentrations that include the ED50 with low toxicity. The dosage can vary within this range depending upon the dosage form employed and the route of administration utilized.

[0743] The components used to formulate the pharmaceutical compositions are preferably of high purity and are substantially free of potentially harmful contaminants (e.g., National Food (NF) grade, generally analytical grade, and more typically pharmaceutical grade). Moreover, compositions intended for in vivo use are usually sterile. To the extent that a given compound must be synthesized prior to use, the resulting product is typically substantially free of any potentially toxic agents, particularly any endotoxins, which may be present during the synthesis or purification process. Compositions for parental administration are also sterile, substantially isotonic and made under Good Manufacturing Practices (GMP) conditions.

[0744] The effective amount of a therapeutic composition to be given to a particular patient will depend on a variety of factors, several of which will differ from patient to patient. A competent clinician will be able to determine an effective amount of a therapeutic agent to administer to a patient to halt or reverse the progression the disease condition as required. Utilizing LD50 animal data, and other information available for the agent, a clinician can determine the maximum safe dose for an individual, depending on the route of administration. For instance, an intravenously administered dose may be more than an intrathecally administered dose, given the greater body of fluid into which the therapeutic composition is being administered. Similarly, compositions which are rapidly cleared from the body may be administered at higher doses, or in repeated doses, in order to maintain a therapeutic concentration. Utilizing ordinary skill, the competent clinician will be able to optimize the dosage of a particular therapeutic in the course of routine clinical trials.

[0745] A subject kit can include a quenched PAMmer and one or more of: a Cas9 protein; a nucleic acid encoding a Cas9 protein; a Cas9 guide RNA; a nucleic acid encoding a Cas9 guide RNA; an activator; a nucleic acid encoding an activator; a targeter; and a nucleic acid encoding a targeter; all of which are described in detail above.

[0746] In some embodiments of any of the above kits, the kit comprises an activator and/or a targeter. In some embodiments of any of the above kits, the kit comprises a Cas9 single guide RNA. In some embodiments of any of the above kits, the kit comprises two or more guide RNAs (e.g, dual and/or Cas9 single guide RNAs). In some embodiments of any of the above kits, the kit comprises two or more quenched PAMmers. In some embodiments of any of the above kits, quenched PAMmers and/or Cas9 guide RNAs (e.g., including two or more guide RNAs) can be provided as an array (e.g., an array of RNA molecules, an array of DNA molecules, e.g., encoding the guide RNA(s), etc.). Such kits can be useful, for example, for use in conjunction with the above described genetically modified host cells that comprise a Cas9 protein. Components of a subject kit can be in separate containers; or can be combined in a single container.

[0747] Any of the above-described kits can further include one or more additional reagents, where such additional reagents can be selected from: a dilution buffer; a reconstitution solution; a wash buffer; a control reagent; a control expression vector or RNA polynucleotide; a reagent for in vitro production of the Cas9 protein, e.g., from DNA and/or RNA, and the like.

[0748] In some cases, a subject kit includes a variant Cas9 protein that exhibits reduced nuclease activity relative to wild-type Cas9 (and/or a nucleic acid encoding the same).

[0749] A subject kit can further include one or more additional reagents, where such additional reagents can be selected from: a buffer; a wash buffer; a control reagent; a control expression vector or RNA polynucleotide; a reagent for in vitro production of a Cas9 protein, e.g., from DNA and/or RNA; and the like. In some cases, a Cas9 protein included in a subject kit is a wild type Cas9 protein. In some cases, a Cas9 protein included in a subject kit is a variant Cas9 polypeptide (e.g., a Cas9 protein with reduced nuclease activity). In some cases, a Cas9 protein included in a subject kit is a Cas9 fusion protein. Components of a subject kit can be in separate containers; or can be combined in a single container.

[0750] In addition to above-mentioned components, a subject kit can further include instructions for using the components of the kit to practice the subject methods. The instructions for practicing the subject methods are generally recorded on a suitable recording medium. For example, the instructions may be printed on a substrate, such as paper or plastic, etc. As such, the instructions may be present in the kits as a package insert, in the labeling of the container of the kit or components thereof (i.e., associated with the packaging or subpackaging) etc. In other embodiments, the instructions are present as an electronic storage data file present on a suitable computer readable storage medium, e.g. CD-ROM, diskette, flash drive, etc. In yet other embodiments, the actual instructions are not present in the kit, but means for obtaining the instructions from a remote source, e.g. via the internet, are provided. An example of this embodiment is a kit that includes a web address where the instructions can be viewed and/or from which the instructions can be downloaded. As with the instructions, this means for obtaining the instructions is recorded on a suitable substrate.

[0751] Libraries

[0752] The present disclosure provides a library of two or more PAMmers. The present disclosure provides a library of two or more targeting pairs, where a targeting pair is a Cas9 guide RNA and a cognate PAMmer. Thus, each targeting pair is associate with (targets) one target site of a single stranded target nucleic acid. The guide RNAs and/or PAMmers can be present in the library as nucleic acids (e.g., recombinant expression vectors) comprising nucleotides encoding guide RNAs and/or PAMmers.

[0753] A subject library can comprise from about 2 targeting pairs to about 10¹² targeting pairs; e.g., a subject library can comprise from about 2 targeting pairs to about 10² targeting pairs, from about 10² targeting pairs to about 10³ targeting pairs, from about 10³ targeting pairs to about 10⁵ targeting pairs, from about 10⁵ targeting pairs to about 10⁷ targeting pairs, from about 10⁷ targeting pairs to about 10⁹ targeting pairs, or from about 10⁹ targeting pairs to about 10¹² targeting pairs.

[0754] A “targeting pair” of a subject library differs from other members of the library in the nucleotide sequence of the targeting segment of the guide RNA as well as the orientation segment and/or the specificity segment of the PAMmer. Thus, e.g., each targeting pair of a subject library can comprise a Cas9 guide RNA with the same or substantially the same nucleotide sequence of the protein-binding segment as all other members of the library. In this way, the library can comprise members that bind to different target nucleic acids.

### EXAMPLES

[0755] The following examples are put forth so as to provide those of ordinary skill in the art with a complete disclosure and description of how to make and use the present invention, and are not intended to limit the scope of what the inventors regard as their invention nor are they intended to represent that the experiments below are all or the only experiments performed. Efforts have been made to ensure accuracy with respect to numbers used (e.g. amounts, temperature, etc.) but some experimental errors and deviations should be accounted for. Unless indicated otherwise, parts are parts by weight, molecular weight is weight average molecular weight, temperature is in degrees Celsius, and pressure is at or near atmospheric. Standard abbreviations may be used, e.g., bp, base pair(s); kb, kilobase(s); pl, picoliter(s); s or sec, second(s); min, minute(s); h or hr, hour(s); aa, amino acid(s); kb, kilobase(s); bp, base pair(s); nt, nucleotide(s); i.m., intramuscular(ly); i.p., intraperitoneal(ly); s.c., subcutaneous(ly); and the like.

[0756] In FIGS. 1-6 of the following working examples, a subject PAMmer is schematized above or below the appropriate experimental lanes and the PAM sequence is boxed (also refer to FIGS. 8A-D).

### Example 1

### Use of Cas9 to Cleave a Single Stranded RNA (ssRNA)

[0757] The working examples demonstrate that a Cas9 protein associated with a Cas9 guide RNA can bind and cleave single stranded RNA (ssRNA) target sequences. Single stranded target nucleic binding is stabilized by including a short PAM-containing oligonucleotide (‘PAMmer’) that hybridizes to the single stranded target nucleic acid (e.g, RNA and/or DNA) downstream of the region that is recognized sequence-specifically through base-pairing with the guide RNA. Inclusion of the PAMmer also activates Cas9 to cleave the singled stranded target nucleic acid using the same HNH nuclease domain that cleaves double stranded target nucleic acid (dsDNA).

[0758] The working examples demonstrate that Cas9 complexed with guide RNA binds target RNA and that PAMmers increase the affinity of this interaction (FIG. 1); that longer PAMmers lead to higher affinity binding, and that the 5′-NGG-3′ PAM itself does not need to base-pair with target nucleic acid for this effect (FIG. 2); that PAMmers activate Cas9 complexed with guide RNA to cleave target RNA (FIG. 3); that this activating effect is dependent on the PAM sequence, and is not recovered with just flanking RNA:DNA duplex (FIG. 4).

[0759] The working examples demonstrate that Cas9 can be used to target single stranded nucleic acids. This is useful for multiple applications, including (but not limited to) in vivo RNA imaging/localization, RNA-protein analysis through the affinity purification of specific RNA molecules via Cas9, and programmable cleavage/degradation of target RNAs in vitro or in vivo.

[0760] FIG. 1. Specific single-stranded RNA binding by Cas9 is the absence or presence of a PAM-containing DNA oligonucleotide (‘PAMmer’). Binding assays were performed with S. pyogenes Cas9 (complexed with a Cas9 guide RNA) in the presence of ˜1 nM 5′-³²P-labeled double-stranded DNA, single-stranded RNA or single-stranded RNA in the presence of a DNA oligonucleotide containing a TGG PAM, GG PAM, or no PAM at its 5′ end. Cas9 was held constant at 300 nM and the guide RNA was titrated from 0.3 nM to 300 nM. Reactions were resolved on a 5% native polyacrylamide gel containing 5 mM MgCl₂ and visualized using a phoshorimager.

[0761] FIG. 2. Specific single-stranded RNA binding by Cas9 is the absence or presence of PAMmers of variable length. (A-B) Binding assays were performed with S. pyogenes Cas9 (complexed with a Cas9 guide RNA) in the presence of ˜1 nM 5′-³²P-labeled single-stranded RNA or single-stranded RNA in the presence of PAMmers containing increasing lengths downstream of the TGG sequence. These experiments demonstrate that longer PAMmers lead to higher affinity binding, likely as a consequence of increased stability of the PAMmer:ssRNA hybrid duplex. The PAM itself does not need to base-pair with target RNA for high-affinity binding by Cas9:RNA (bottom gel, right side). Cas9 was held constant at 300 nM and the guide RNA was titrated from 0.01 nM to 300 nM. Reactions were resolved on a 5% native polyacrylamide gel containing 5 mM MgCl₂ and visualized using a phoshorimager. The PAM sequence itself within the PAMmer need not be base-paired to the target nucleic acid. Thus, this strategy can be used to target non PAM-containing sites within a target nucleic acid.

[0762] FIG. 3. Specific single-stranded RNA cleavage by Cas9 is activated by the addition of a PAMmer having a PAM sequence. Cleavage assays were performed with 100 nM S. pyogenes Cas9 (complexed with a Cas9 guide RNA) in the presence of ˜1 nM 5′-³²P-labeled double-stranded DNA, single-stranded RNA or single-stranded RNA pre-annealed with a DNA oligonucleotide containing a TGG PAM sequence. Time points were taken at 0, 1, 5, 60 and 120 min and immediately quenched with formamide-EDTA buffer. Quenched samples were resolved on a 12% urea-polyacrylamide gel electrophoresis (PAGE) gel and visualized using a phosphorimager.

[0763] FIG. 4. Specific single-stranded RNA cleavage by Cas9 is activated by the addition of a PAMmer having a PAM sequence, but not by a PAMmer without a PAM sequence. (A-B) Cleavage assays were performed with 100 nM S. pyogenes Cas9 (complexed with a Cas9 guide RNA) in the presence of ˜1 nM 5′-³²P-labeled double-stranded DNA, single-stranded RNA or single-stranded RNA pre-annealed with various DNA oligonucleotides. Time points were taken at 0, 1, 2, 5, 10, 30 and 60 min and immediately quenched with formamide-EDTA buffer. Quenched samples were resolved on a 12% urea-PAGE gel and visualized using a phoshoimager. A ssDNA target nucleic acid was not cleaved when an RNA PAMmer was used. However, ssRNA and ssDNA target nucleic acids were both cleaved when a DNA PAMmer was used (also see FIG. 6).

[0764] FIG. 5.(A) Cas9 programmed with guide RNA was incubated with four different target ssRNA sequences; each reaction contained a 100-fold excess of complementary PAMmer (without a specificity segment) specific to each target ssRNA. Cas9 binds each of the targets with similar affinity, despite the fact that the guide RNA is complementary only to the λ2 target. These data indicate that, under these conditions, the affinity of Cas9 for these targets is dominated by presentation of the PAMmer, and not by sequence complementarity between the guide RNA and target RNA. Thus, when the PAMmer does not have a specificity segment (i.e., the PAMmer has a PAM sequence and an orientation segment), the binding of a Cas9 protein:guide RNA complex does not require complementarity between the targeting segment of the guide RNA and the target nucleic acid. (B) The experiment from FIG. 5A was repeated, except that the PAMmers each contained a specificity segment at the 5′ end (the specificity segment was positioned 5′ of the PAM sequence, as depicted). The target nucleic acids were 55 nucleotide (nt) ssRNA and the PAMmers were each 55 nt (with a 20 nt specificity segment) DNA, such that an RNA:DNA duplex was formed. When Cas9 was complexed with λ2 guide RNA (i.e., the specificity segment of the guide RNA was complementary to the λ2 target ssRNA, but not the λ3 or λ4 targets). Only the λ2 target could be melted open and recognized, presumably via base pairing between guide RNA and target RNA, while the off-targets (λ3 and λ4) were unbound. These experiments demonstrate that when the PAMmer includes a specificity segment, increased specificity for the target nucleic acid can be achieved. Not to be bound by theory, this is presumably because the target duplex (PAMmer bound to the target single stranded nucleic acid) must be unwound before initiating base-pairing to the target ssRNA. Thus, in some instances when the PAMmer has a specificity segment, the binding of a Cas9 protein:guide RNA complex to a single stranded target nucleic acid requires complementarity between the targeting segment of the guide RNA and the target nucleic acid. (C) Cleavage assays were performed with 100 nM S. pyogenes Cas9 (complexed with a Cas9 guide RNA) in the presence of ˜1 nM 5′-³²P-labeled double-stranded DNA, single-stranded RNA or single-stranded RNA pre-annealed with a PAMmer (a DNA oligonucleotide containing a TGG PAM sequence (as depicted)). Time points were taken at 0, 5, 10, 30, and 60 minutes, at 37° C. and immediately quenched with formamide-EDTA buffer. Quenched samples were resolved on a 12% urea-PAGE gel and visualized using a phosphorimager. These data show that when the PAMmer does not have a specificity segment (i.e., the PAMmer has a PAM sequence and an orientation segment), the cleavage of a single stranded target nucleic acid by a Cas9 protein does require complementarity between the targeting segment of the guide RNA and the target nucleic acid (although binding does not have this requirement, see FIG. 5A).

[0765] FIG. 6. Cas9 can be activated by a PAM-containing oligonucleotide in which the TGG PAM sequence is mismatched with the target RNA. Cleavage assays were performed with 100 nM S. pyogenes Cas9 (complexed with a Cas9 guide RNA) in the presence of ˜1 nM 5′-³²P-labeled single-stranded RNA, single-stranded RNA pre-annealed with various DNA oligonucleotides, or single-stranded RNA. Time points were taken at 0, 5, 10, 30 and 60 min and immediately quenched with formamide-EDTA buffer. Quenched samples were resolved on a 12% urea-PAGE gel and visualized using a phoshoimager. The results show that the PAM sequence in the PAMmer need not base-pair with the single stranded target nucleic acid (ssRNA in this case) for nuclease activation, indicating that non-PAM containing nucleic acid sequences can be targeted.

### Example 2

### Use of Cas9 to Cleave and/or Bind a Single Stranded DNA (ssDNA)

[0766] Materials and Methods

[0767] Wild-type Cas9 from S. pyogenes was purified. crRNAs (42 nucleotides in length) were either ordered synthetically (Integrated DNA Technologies) or transcribed in vitro with T7 polymerase using single-stranded DNA templates. tracrRNA was also transcribed in vitro and contained nucleotides 15-87 following the numbering scheme used previously. crRNA:tracrRNA duplexes were prepared by mixing equimolar concentrations of each RNA in Hybridization Buffer (20 mM Tris-HCl pH 7.5, 100 mM KCl, 5 mM MgCl₂), heating to 95° C. for 30 seconds, and slow-cooling. The substrates were prepared by 5′-radiolabeling only the target strand, hybridizing it to a 10× excess of the indicated unlabeled complementary strand, and gel purifying the partial/full duplex by 10% native gel electrophoresis. Cas9:RNA complexes were reconstituted prior to cleavage and binding experiments by incubating Cas9 and the crRNA:tracrRNA duplex for 10 min at 37° C. in Reaction Buffer. Cleavage assays were conducted in reaction buffer at room temperature and analyzed by 10% denaturing polyacrylamide gel electrophoresis and phosphorimaging. Aliquots were removed at each time point and quenched by the addition of gel loading buffer supplemented with 25 mM EDTA (at 1×). Reactions contained ˜1 nM radiolabeled DNA substrate and 100 nM Cas9:RNA

[0768] Results

[0769] In the absence of a PAMmer, a ssDNA substrate was cleaved more than two orders of magnitude slower than a double-stranded DNA (dsDNA) substrate (FIG. 7A and FIG. 7B), despite the fact that dCas9:RNA (dCas9 complexed with a Cas9 guide RNA) bound both the dsDNA and ssDNA substrates with similar affinities (FIG. 7b).

[0770] Substrates were prepared with varying lengths of dsDNA at the 3′ flanking sequence (FIG. 7a). Cleavage assays revealed that the ssDNA target strand could be activated for cleavage in the presence of flanking dsDNA that extended across the PAM sequence (i.e., the presence of a PAMmer), but that this activating effect was lost when the dsDNA was truncated immediately before the PAM sequence (FIG. 7A and FIG. 7B). Binding experiments confirmed these results were not a consequence of discrimination at the level of binding (FIG. 7b). Rather, the presence of the 5′-NGG-3′ PAM on the non-target strand was critical for a step of the reaction that occurred after binding. Quantification of cleavage assays can be seen in FIG. 7c. For binding experiments (quantified in FIG. 7D), substrates were gel purified after annealing the radiolabelled target strand to a 10× excess of cold complement. Binding reactions contained ˜0.1 nM DNA and increasing concentrations of dCas9-RNA, and were incubated at 37° C. for 1 h before being resolved by 5% native PAGE. The quantified data were fit with standard binding isotherms (solid lines). Results from three independent experiments yielded apparent Kd values of 0.27±0.14 nM (substrate 1), 0.28±0.12 nM (substrate 2), 0.59±0.18 nM (substrate 3) and 0.21±0.06 nM (substrate 4).

### Example 3

### Variant Cas9 Proteins with Reduced Nuclease Activity

[0771] Materials and Methods

[0772] PAM Recognition by SpyCas9 Involves Two Tryptophan-Containing Flexible Loops

[0773] To gain insight into PAM sequence binding by S. pyogenes Cas9 (“SpyCas9”), the SpyCas9 RuvC nuclease domain structure was compared to that of the RuvC Holliday junction resolvase-substrate complex (PDB entry 4LD0). RuvC structures were then superpositioned to model the likely trajectory of the non-target DNA strand in the SpyCas9 holoenzyme. The DNA strand is located along the length of the nuclease lobe cleft in an orientation that would position the 3′ end of the DNA, and hence the PAM, at the junction of the two lobes, in the vicinity of the Arg-rich segment and the Topo-homology domain.

[0774] To directly identify regions of Cas9 involved in PAM binding, catalytically inactive SpyCas9 (D10A/H840A), along with a crRNA:tracrRNA guide RNA, was bound to DNA targets carrying a photoactivatable 5-bromodeoxyuridine (Br-dU) nucleotide adjacent to either end of the GG PAM motif on the non-target strand (FIG. 16A). Following UV irradiation and trypsin digestion, covalent peptide-DNA crosslinks were detected (FIG. 16A), whereas a DNA substrate containing Br-dU on the target strand opposite the PAM failed to produce a crosslink. After treatment with nuclease and phosphatase to digest cross-linked DNA, nano-HPLC MS/MS was performed to identify tryptic peptides containing an extra mass resulting from covalent dU or p-dU adducts (FIG. 16A). The nucleotide immediately 5′ to the GG motif cross-linked to residue W476^{Spy}, whereas the residue immediately 3′ to the motif cross-linked to residue W1126^{Spy}. Both tryptophans are located in disordered regions of the SpyCas9 structure that are ˜30 Å apart. W476^{Spy} resides in a 53-aa loop at the edge of the alpha helical lobe underneath the Arg-rich region, whereas W1126^{Spy} is in a 33-aa loop that connects the RuvC domain and the Topo-homology domain. These tryptophan residues are conserved among Type II-A Cas9 proteins that utilize the same NGG PAM to cleave target DNA in vitro, but are absent from the Neisseria meningitidis and Streptococcus thermophilus Type II-C Cas9 proteins, which are known to recognize different PAMs (FIG. 16C, FIG. 16D).

[0775] To test the roles of both loops in DNA target recognition and cleavage, triple alanine substitutions of residues 475^{Spy}-477^{Spy} (P-W-N) and 1125^{Spy}-1127^{Spy} (D-W-D) (of S. Pyogenes Cas9) were made and cleavage assays were performed with double-stranded DNA targets (FIG. 16B). SpyCas9 mutated in residues 1125^{Spy}-1127^{Spy} showed wild-type cleavage activity, whereas mutations in residues 475^{Spy}-477^{Spy} caused a subtle but reproducible decrease of activity compared to wild-type. Remarkably, mutating both loops simultaneously almost completely abolished SpyCas9 activity under the conditions tested (FIG. 16D). These data demonstrate that at least one tryptophan is necessary to promote the DNA cleavage reaction. The spatial constraints of crosslink formation and the distance of both tryptophan residues from either nuclease domain argue against a direct catalytic role of these residues, and instead suggest that they are involved in PAM binding.

[0776] FIG. 16. Crosslinking data identify a PAM binding region adjacent to the active-site cleft. (A) Cartoon (left) showing the design and workflow of crosslinking experiments with DNA substrates containing 5-bromodeoxyuridine (Br-dU) nucleotides for LC-MS/MS analysis. The guide/target sequence is depicted in red and the PAM is highlighted in yellow. The denaturing polyacrylamide gel (right) demonstrates the generation of covalent peptide-DNA adducts with Br-dU1 and catalytically inactive SpyCas9 (dCas9) following UV irradiation and trypsin digestion. (B) DNA cleavage activity assays with SpyCas9 constructs containing mutations in residues identified by crosslinking and LC-MS/MS experiments. (C) Multiple sequence alignments of selected portions of Cas9 proteins associated with Type II-A CRISPR loci. Primary sequences of Cas9 proteins from Streptococcus pyogenes (GI 15675041), Streptococcus thermophilus LMD-9 (GI 116628213), Listeria innocua Clip 11262 (GI 16801805), Streptococcus agalactiae A909 (GI 76788458), Streptococcus mutans UA159 (GI 24379809), and Enterococcus faecium 1,231,408 (GI 257893735) were aligned using MAFFT. The alignment was generated in ESPript using default settings. Triangles indicate the tryptophan residues involved in PAM binding based on SpyCas9 crosslinking assay. (D) Multiple sequence alignment of selected portions of Type II-A and II-C Cas9 orthologs. The primary sequences of Cas9 orthologs were aligned using CLUSTALW. The alignment was generated in ESPript using default settings. Triangles indicate the tryptophan residues involved in PAM binding based on SpyCas9 crosslinking assay. Accession numbers for each Cas9 ortholog are as follows: Ana (Actinomyces naeslundii str. Howell 279, EJN84392.1), Nme (Neisseria meningitidis, WP_019742773.1), Cje (Campylobacter jejuni, WP_002876341.1), Tde (Treponema denticola, WP_002676671.1), Sth (Streptococcus thermophilus LMD-9, YP_820832.1), Smu (Streptococcus mutans, WP_019803776.1), Sag (Streptococcus agalactiae, WP_001040088.1), and Spy (Streptococcus pyogenes, YP_282132.1).

### Example 4

### Use of PAMmers Having One or More Modified Nucleotides

[0777] Experiments were carried out as described above for binding and cleaving, and further details are provided in FIG. 17. The data show that PAMmers having modified nucleotides can be successfully used in the subject methods, as assayed by both binding assays (FIG. 17A) and cleavage assays (FIG. 17B). The target nucleic acid is a single stranded RNA. For both FIG. 17A and FIG. 17B, the number associated with each panel (lower left in FIG. 17A; above and to the right in FIG. 17B) refers to the PAMmer that was used (see key below). Note: the gel in FIG. 17B has “smiling”, but “uncleaved” and “cleaved” substrates are clearly labeled as such.

[0778] Legend for FIG. 17A and FIG. 17B

(1) ssDNA PAMmer:
(SEQ ID NO: 1466)
TGGGCTGTCAAAATTGAGC;
(2) 2′OMe/ssDNA PAMmer:
(SEQ ID NO: 1588)
mGmGmGmCmUmGmUmCmAmAAATTGAGC,
where mN is 2′OMe modified nucleotide N;
(3) 2′OMe/ssDNA PAMmer:
(SEQ ID NO: 1514)
mUGGGCTGTCAAAATTGAGmC,
where mN is 2′OMe modified nucleotide N;
(4) phosphorothioate ssDNA PAMmer:
(SEQ ID NO: 1589)
G*G*G*C*T*G*T*C*A*AAATTGAGC,
where * is a phosphorothioate linkage;
(5) phosphorothioate ssDNA PAMmer:
(SEQ ID NO: 1590)
T*GGGCTGTCAAAATTGAG*C,
where * is a phosphorothioate linkage;
(6) 2′F/ssDNA PAMmer:
(SEQ ID NO: 1591)
fGfGfGfCfTfGfTfCfAfAAATTGAGC,
where fN is a 2′F modified nucleotide N;
(7) LNA/ssDNA PAMmer:
(SEQ ID NO: 1592)
+G + G + GCTG + T + C + AAAATTGAGC,
where +N is a LNA nucleotide N;
(8) 2′F/ssDNA PAMmer:
(SEQ ID NO: 1593)
fUGGGCTGTCAAAATTGAGfC,
where fN is a 2′F modified nucleotide N;
and
(9) LNA/ssDNA PAMmer:
(SEQ ID NO: 1594)
+TGGGCTGTCAAAATTGAG + C,
where +N is a LNA nucleotide N.

### Example 5

### Programmable RNA Recognition and Cleavage by CRISPR/Cas9

[0779] The CRISPR-associated protein Cas9 is an RNA-guided DNA endonuclease that uses RNA-DNA complementarity to identify target sites for sequence-specific double-stranded DNA (dsDNA) cleavage. In its native context, Cas9 acts on DNA substrates exclusively because both binding and catalysis require recognition of a short DNA sequence, known as the protospacer adjacent motif (PAM), next to and on the strand opposite the twenty-nucleotide target site in dsDNA. Cas9 has proven to be a versatile tool for genome engineering and gene regulation in a large range of prokaryotic and eukaryotic cell types, and in whole organisms, but it has been thought to be incapable of targeting RNA5. The experiments herein demonstrate that Cas9 binds with high affinity to single-stranded RNA (ssRNA) targets matching the Cas9-associated guide RNA sequence when the PAM is presented in trans as a separate DNA oligonucleotide. Furthermore, PAM-presenting oligonucleotides (PAMmers) stimulate site-specific endonucleolytic cleavage of ssRNA targets, similar to PAM-mediated stimulation of Cas9-catalyzed DNA cleavage. Using PAMmers, Cas9 can be specifically directed to bind or cut RNA targets while avoiding corresponding DNA sequences. This strategy enables the isolation of a specific endogenous messenger RNA from cells. These results reveal a fundamental connection between PAM binding and substrate selection by Cas9, and highlight the utility of Cas9 for programmable transcript recognition without the need for tags.

[0780] CRISPR-Cas immune systems must discriminate between self and nonself to avoid an autoimmune response. In type I and II systems, foreign DNA targets that contain adjacent PAM sequences are targeted for degradation, whereas potential targets in CRISPR loci of the host do not contain PAMs and are avoided by RNA-guided interference complexes. Single-molecule and bulk biochemical experiments showed that PAMs act both to recruit Cas9-guide-RNA (Cas9-gRNA) complexes to potential target sites and to trigger nuclease domain activation. Cas9 from Streptococcus pyogenes recognizes a 5′-NGG-3′ PAM on the non-target (displaced) DNA strand, suggesting that PAM recognition may stimulate catalysis through allosteric regulation. Based on the observations that single-stranded DNA (ssDNA) targets can be activated for cleavage by a separate PAMmer, a similar strategy was contemplated for enabling Cas9 to cleave ssRNA targets in a programmable fashion (FIG. 18a). Using S. pyogenes Cas9 and dual-guide RNAs (Methods), in vitro cleavage experiments were performed using a panel of RNA and DNA targets (FIG. 18b and Table 2). Deoxyribonucleotide PAMmers specifically activated Cas9 to cleave ssRNA (FIG. 18c), an effect that required a 5′-NGG-3′ or 5′-GG-3′ PAM. RNA cleavage was not observed using ribonucleotide-based PAMmers, suggesting that Cas9 may recognize the local helical geometry and/or deoxyribose moieties within the PAM. Consistent with this hypothesis, dsRNA targets were not cleavable and RNA-DNA heteroduplexes could only be cleaved when the non-target strand was composed of deoxyribonucleotides. Notably, Cas9 cleaved the ssRNA target strand between positions 4 and 5 of the base-paired gRNA-target-RNA hybrid (FIG. 18d), in contrast to the cleavage between positions 3 and 4 observed for dsDNA. This is probably due to subtle differences in substrate positioning. However, a significant reduction in the pseudo-first-order cleavage rate constant of PAMmer-activated ssRNA as compared to ssDNA was not observed (FIG. 22).

[0781] FIG. 18 demonstrates RNA-guided Cas9 cleaving ssRNA targets in the presence of a short PAM presenting DNA oligonucleotide (PAMmer). A, Schematic depicting the approach used to target ssRNA for programmable, sequence-specific cleavage. B, The panel of nucleic acid substrates examined in this study. Substrate elements are coloured as follows: DNA, grey; RNA, black; guide—RNA target sequence, red; DNA PAM, yellow; mutated DNA PAM, blue; RNA PAM, orange. The 18-nucleotide ‘GG PAMmer’ contains only a GG dinucleotide PAM sequence. nt, nucleotide. C, Representative cleavage assay for 5′-radiolabelled nucleic acid substrates using Cas9-gRNA, numbered as in b. D, Cas9-gRNA cleavage site mapping assay for substrate 3. T1 and OH2 denote RNase T1 and hydrolysis ladders, respectively; the sequence of the target ssRNA is shown at right. Sites of G cleavage by RNase T1 are shown at left. Site of Cas9 cleavage (G24) shown at right. E, Representative ssRNA cleavage assay in the presence of PAMmers of increasing length, numbered as in B.

[0782] FIG. 22 depicts quantified data for cleavage of ssRNA by Cas9-gRNA in the presence of a 19-nucleotide PAMmer. Cleavage assays were conducted as described in the Methods, and the quantified data were fitted with single-exponential decays. Results from four independent experiments yielded an average apparent pseudo-first-order cleavage rate constant (mean±s.d.) of 0.032±0.007 min⁻¹. This is slower than the rate constant determined previously for ssDNA in the presence of the same 19-nucleotide PAMmer (7.3±3.2 min⁻¹).

[0783] By varying PAMmer length, it was next tested whether PAMmer nuclease activation depends on the stability of the hybridized PAMmer-ssRNA duplex. ssRNA cleavage was lost when the predicted melting temperature for the duplex decreased below the temperature used in the experiments (FIG. 18e). In addition, large molar excesses of di- or tri-deoxyribonucleotides in solution were poor activators of Cas9 cleavage (FIG. 23). Collectively, these data demonstrate that hybrid substrate structures composed of ssRNA and deoxyribonucleotide-based PAMmers that anneal upstream of the RNA target sequence can be cleaved efficiently by RNA-guided Cas9.

[0784] FIG. 23 demonstrates that RNA cleavage is marginally stimulated by di- and tri-deoxyribonucleotides. Cleavage reactions contained ˜1 nM 5′-radiolabelled target ssRNA and no PAMmer (left), 100 nM 18-nt PAMmer (second from left), or 1 mM of the indicated di- or tri-nucleotide (remaining lanes). Reaction products were resolved by 12% denaturing polyacrylamide gel electrophoresis (PAGE) and visualized by phosphorimaging.

[0785] The binding affinity of catalytically inactive dCas9 (Cas9 (D10A;H840A))-gRNA for ssRNA targets with and without PAMmers was then tested using a gel mobility shift assay. Notably, whereas the previous results showed that ssDNA and PAMmer-activated ssDNA targets are bound with indistinguishable affinity, PAMmer-activated ssRNA targets were bound >500-fold tighter than ssRNA alone (FIG. 19a, b). A recent crystal structure of Cas9 bound to a ssDNA target revealed deoxyribose-specific van der Waals interactions between the protein and the DNA backbone, suggesting that energetic penalties associated with ssRNA binding must be attenuated by favorable compensatory binding interactions with the provided PAM. The equilibrium dissociation constant measured for a PAMmer-ssRNA substrate was within five fold of that for dsDNA (FIG. 19b), and this high-affinity interaction again required a cognate deoxyribonucleotide 5′-GG-3′ PAM (FIG. 19a). Tight binding also scaled with PAMmer length (FIG. 19c), consistent with the cleavage data presented above.

[0786] FIG. 19 demonstrates that dCas9-gRNA binds ssRNA targets with high affinity in the presence of PAMmers. a, Representative electrophoretic mobility shift assay for binding reactions with dCas9-gRNA and a panel of 5′-radiolabelled nucleic acid substrates, numbered as in FIG. 18b. b, Quantified binding data for substrates 1-4 from a fitted with standard binding isotherms. Measured dissociation constants from three independent experiments (mean±s.d.) were 0.036±0.003 nM (substrate 1), >100 nM (substrate 2), 0.20±0.09 nM (substrate 3) and 0.18±0.07 nM (substrate 4). c, Relative binding data for 1 nM dCas9-gRNA and 5′-radiolabelled ssRNA with a panel of different PAMmers. The data are normalized to the amount of binding observed at 1 nM dCas9-gRNA with a 19-nucleotide (nt) PAMmer; error bars represent the standard deviation from three independent experiments.

[0787] It is known that Cas9 possesses an intrinsic affinity for RNA, but sequence specificity of the interaction had not been explored. Thus, to verify the programmable nature of PAMmer-mediated ssRNA cleavage by Cas9-gRNA, three distinct guide RNAs (λ2, λ3, and λ4; each targeting 20-nucleotide sequences within λ2, λ3, and λ4 RNAs, respectively) were prepared and their corresponding ssRNA targets were efficiently cleaved using complementary PAMmers without any detectable cross-reactivity (FIG. 20a). This result indicates that complementary RNA-RNA base pairing is critical in these reactions. Notably however, dCas9 programmed with the λ2 guide RNA bound all three PAMmer-ssRNA substrates with similar affinity (FIG. 20b). This observation suggests that high-affinity binding in this case may not require correct base pairing between the guide RNA and the ssRNA target, particularly given the compensatory role of the PAMmer.

[0788] FIG. 20 shows that 5′-extended PAMmers are required for specific target ssRNA binding. a, Cas9 programmed with either λ2-, λ3- or λ4-targeting gRNAs exhibits sequence-specific cleavage of 5′-radiolabelled λ2, λ3, and λ4 target ssRNAs, respectively, in the presence of cognate PAMmers. b, dCas9 programmed with a λ2-targeting gRNA exhibits similar binding affinity to λ2, λ3, and λ4 target ssRNAs in the presence of cognate PAMmers. Dissociation constants from three independent experiments (mean±s.d.) were 0.20±0.09 nM (λ2), 0.33±0.14 nM (λ3) and 0.53±0.21 nM (λ4). c, Schematic depicting the approach used to restore gRNA-mediated ssRNA binding specificity, which involves 5′-extensions to the PAMmer that cover part or all of the target sequence. d, dCas9 programmed with a λ2-targeting gRNA specifically binds the λ2 ssRNA but not λ3 and λ4 ssRNAs in the presence of complete 5′-extended PAMmers. Dissociation constants from three independent experiments (mean±s.d.) were 3.3±1.2 nM (λ2) and 0.100 nM (λ3 and λ4).

[0789] During dsDNA targeting by Cas9-gRNA, duplex melting proceeds directionally from the PAM and requires the formation of complementary RNA-DNA base pairs to offset the energetic costs associated with dsDNA unwinding. It was therefore tested whether binding specificity for ssRNA substrates would be recovered using PAMmers containing 5′-extensions that create a partially double-stranded target region requiring unwinding (FIG. 20c). Use of a 5′-extended PAMmer enabled dCas9 bearing the λ2 guide sequence to bind sequence selectively to the λ2 PAMmer-ssRNA target. The λ3 and λ4 PAMmer-ssRNA targets were not recognized (FIG. 20d and FIG. 24), although a tenfold reduction in overall ssRNA substrate binding affinity was observed. By systematically varying the length of the 5′ extension, it was found that PAMmers containing 2-8 additional nucleotides upstream of the 5′-NGG-3′ offer a good compromise between gains in binding specificity and concomitant losses in binding affinity and cleavage efficiency (FIG. 25).

[0790] FIG. 24 depicts a representative binding experiment demonstrating guide-specific ssRNA binding with 5′-extended PAMmers. Gel shift assays were conducted as described in the Methods section below. Binding reactions contained Cas9 programmed with λ2 gRNA and either λ2 (on-target), λ3 (off-target) or λ4 (off-target) ssRNA in the presence of short cognate PAMmers or cognate PAMmers with complete 5′-extensions, as indicated. The presence of a cognate 5′-extended PAMmer abrogated off-target binding. Three independent experiments were conducted to produce the data shown in FIG. 20b, d.

[0791] FIG. 25 depicts exploration of RNA cleavage efficiencies and binding specificity using PAMmers with variable 5′-extensions. a, Cleavage assays were conducted as described in the methods section below. Reactions contained Cas9 programmed with λ2 gRNA and λ2 ssRNA targets in the presence of PAMmers with 5′-extensions of variable length. The ssRNA cleavage efficiency decreased as the PAMmer extended further into the target region, as indicated by the fraction of RNA cleaved after 1 h. b, Binding assays were conducted as described in the Methods section below, using mostly the same panel of 5′-extended PAMmers as in a. Binding reactions contained Cas9 programmed with λ2 gRNA and either λ2 (on-target) or λ3 (off-target) ssRNA in the presence of cognate PAMmers with 5′-extensions of variable length. The binding specificity increased as the PAMmer extends further into the target region, as indicated by the fraction of λ3 (off-target) ssRNA bound at 3 nM Cas9-gRNA. PAMmers with 5′ extensions also caused a slight reduction in the relative binding affinity of λ2 (on-target) ssRNA.

[0792] It was next investigated whether nuclease activation by PAMmers requires base pairing between the 5′-NGG-3′ and corresponding nucleotides on the ssRNA. Prior studies have shown that DNA substrates containing a cognate PAM that is mismatched with the corresponding nucleotides on the target strand are cleaved as efficiently as a fully base-paired PAM. This could enable targeting of RNA while precluding binding or cleavage of corresponding genomic DNA sites lacking PAMs (FIG. 21a). To test this possibility, it was first demonstrated that Cas9-gRNA cleaves PAMmer-ssRNA substrates regardless of whether the PAM is base paired (FIG. 21b, c). When Cas9-RNA was incubated with both a PAMmer-ssRNA substrate and the corresponding dsDNA template containing a cognate PAM, both targets were cleaved. In contrast, when a dsDNA target lacking a PAM was incubated together with a PAMmer-ssRNA substrate bearing a mismatched 5′-NGG-3′ PAM, Cas9-gRNA selectively targeted the ssRNA for cleavage (FIG. 21c). The same result was obtained using a mismatched PAMmer with a 5′ extension (FIG. 21c), demonstrating that this general strategy enables the specific targeting of RNA transcripts while effectively eliminating any targeting of their corresponding dsDNA template loci.

[0793] It was next tested whether Cas9-mediated RNA targeting could be applied in tagless transcript isolation from HeLa cells (FIG. 21d). The immobilization of Cas9 on a solid-phase resin is described in the Methods section below (see also FIG. 26). As a proof of concept, GAPDH mRNA was first isolated from HeLa total RNA using biotinylated dCas9, gRNAs and PAMmers (Table 2) that target four non-PAM-adjacent sequences within exons 5-7 (FIG. 21e). A substantial enrichment of GAPDH mRNA relative to control b-actin mRNA was observed by northern blot analysis, but no enrichment using a non-targeting gRNA or dCas9 alone was observed (FIG. 21f).

[0794] FIG. 21 shows that RNA-guided Cas9 can target non-PAM sites on ssRNA and can be used to isolate GAPDH mRNA from HeLa cells in a tagless manner. a, Schematic of the approach designed to avoid cleavage of template DNA by targeting non-PAM sites in the ssRNA target. b, The panel of nucleic acid substrates tested in c. c, Cas9-gRNA cleaved ssRNA targets with equal efficiency when the 5′-NGG-3′ of the PAMmer was mismatched with the ssRNA. This strategy enables selective cleavage of ssRNA in the presence of non-PAM target dsDNA. d, Schematic of the dCas9 RNA pull-down experiment. e, GAPDH mRNA transcript isoform 3 (GAPDH-003) shown schematically, with exons common to all GAPDH protein-coding transcripts in red and gRNA/PAMmer targets G1-G4 indicated. kb, kilobase pairs. f, Northern blot showing that gRNAs and corresponding 5′-extended PAMmers enabled tagless isolation of GAPDH mRNA from HeLa total RNA; b-actin mRNA is shown as a control. g, Northern blot showing tagless isolation of GAPDH mRNA from HeLa cell lysate with varying 2′-OMe-modified PAMmers. RNase H cleavage is abrogated with v4 and v5 PAMmers; b-actin mRNA is shown as a control. u, unmodified PAMmer (G1). v1-v5, increasingly 2′-OMe-modified PAMmers (G1), see g for PAMmer sequences. h, Sequences of unmodified and modified GAPDH PAMmers used in g; 2′-OMe-modified nucleotides are shown in red.

[0795] FIG. 26 provides date related to site-specific biotin labeling of Cas9. a, In order to introduce a single biotin moiety on Cas9, the solvent accessible, non-conserved amino-terminal methionine was mutated to a cysteine (M1C; red text) and the naturally occurring cysteine residues were mutated to serine (C80S and C574S; bold text). This enabled cysteine-specific labeling with EZ-link Maleimide-PEG2-biotin through an irreversible reaction between the reduced sulphydryl group of the cysteine and the maleimide group present on the biotin label. Mutations of dCas9 are also indicated in the domain schematic. b, Mass spectrometry analysis of the Cas9 biotin-labeling reaction confirmed that successful biotin labeling only occurred when the M1C mutation was present in the Cys-free background (C80S;C574S). The mass of the Maleimide-PEG2-biotin reagent is 525.6 Da. c, Streptavidin bead binding assay with biotinylated (biot.) or non-biotinylated (non-biot.) Cas9 and streptavidin agarose or streptavidin magnetic beads. Cas9 only remained specifically bound to the beads after biotin labeling. d, Cleavage assays were conducted as described in the Methods and resolved by denaturing PAGE. Reactions contained 100 nM Cas9 programmed with λ2 gRNA and ˜1 nM 5′-radiolabelled λ2 dsDNA target. e, Quantified cleavage data from triplicate experiments were fitted with single-exponential decays to calculate the apparent pseudo-first-order cleavage rate constants (average±standard deviation). Both Cys-free and biotin-labeled Cas9 (M1C) retained wild-type activity.

[0796] This approach was then used to isolate endogenous GAPDH transcripts from HeLa cell lysate under physiological conditions. In initial experiments, Cas9-gRNA captured two GAPDH-specific RNA fragments rather than the full-length mRNA (FIG. 21g). Based on the sizes of these bands, it was surmised that RNA-DNA heteroduplexes formed between the mRNA and PAMmer were cleaved by cellular RNaseH. Previous studies have shown that modified DNA oligonucleotides can abrogate RNaseH activity, and it was therefore investigated whether Cas9 would tolerate chemical modifications to the PAMmer. A wide range of modifications (locked nucleic acids, 2′-OMe and 2′-F ribose moieties) still enabled PAMmer-mediated nuclease activation (FIG. 27). Furthermore, by varying the pattern of 2′-OMe modifications in the PAMmer, RNase-H-mediated cleavage could be completely eliminated during the pull-down and intact GAPDH mRNA was successfully isolated (FIG. 21g, h). Notably, specific isolation of GAPDH mRNA in the absence of any PAMmer occurred, albeit with lower efficiency, suggesting that Cas9-gRNA can bind to GAPDH mRNA through direct RNA-RNA hybridization (FIG. 21f, g and FIG. 28). These experiments demonstrate that RNA guided Cas9 can be used to purify endogenous untagged RNA transcripts. In contrast to current oligonucleotide-mediated RNA-capture methods, this approach works well under physiological salt conditions and does not require crosslinking or large sets of biotinylated probes.

[0797] FIG. 27 depicts data showing that RNA-guided Cas9 can utilize chemically modified PAMmers. Nineteen-nucleotide PAMmer derivatives containing various chemical modifications on the 5′ and 3′ ends (capped) or interspersed throughout the strand still activated Cas9 for cleavage of ssRNA targets. These types of modification are often used to increase the in vivo half-life of short oligonucleotides by preventing exo- and endonuclease-mediated degradation. Cleavage assays were conducted as described in the Methods. PS, phosphorothioate bonds; LNA, locked nucleic acid.

[0798] FIG. 28 depicts data showing that Cas9 programmed with GAPDH-specific gRNAs can pull down GAPDH mRNA in the absence of PAMmers. a, Northern blot showing that, in some cases, Cas9-gRNA is able to pull down detectable amounts of GAPDH mRNA from total RNA without requiring a PAMmer. b, Northern blot showing that Cas9-gRNA G1 is also able to pull down quantitative amounts of GAPDH mRNA from HeLa cell lysate without requiring a PAMmer. s, standard; v1-5, increasingly 2′-OMe-modified PAMmers. See FIG. 21g for PAMmer sequences.

[0799] The data herein demonstrate the ability to re-direct the dsDNA targeting capability of CRISPR/Cas9 for RNA-guided ssRNA binding and/or cleavage (which can be referred to as RCas9, an RNA-targeting Cas9). Examples of uses for compositions and methods described herein include, but are not limited to those schematized in FIG. 29. Although certain engineered proteins such as PPR proteins and Pumilio/FBF (PUF) repeats show promise as platforms for sequence-specific RNA targeting, these strategies require re-designing the protein for every new RNA sequence of interest. In contrast to these systems, the molecular basis for RNA recognition by RCas9 is now clear and requires only the design and synthesis of a matching gRNA and complementary PAMmer. The ability to recognize endogenous RNAs within complex mixtures with high affinity and in a programmable manner allows for direct transcript detection, analysis and manipulation without the need for genetically encoded affinity tags.

[0800] FIG. 29 depicts schematics of example applications of RCas9 (RNA directed Cas9) for untagged transcript analysis, detection and manipulation. a, Catalytically active RCas9 can be used to target and cleave RNA targets, particularly those for which RNA-interference-mediated repression/degradation is not possible. b, Tethering the eukaryotic initiation factor eIF4G to a catalytically inactive dRCas9 targeted to the 5′ untranslated region of an mRNA can drive translation. c, dRCas9 tethered to beads can be used to specifically isolate RNA or native RNA-protein complexes of interest from cells for downstream analysis or assays including identification of bound-protein complexes, probing of RNA structure under native protein-bound conditions, and enrichment of rare transcripts for sequencing analysis. d, dRCas9 tethered to RNA deaminase or N6-mA methylase domains could direct site-specific A-to-I editing or methylation of RNA, respectively. e, dRCas9 fused to a U1 recruitment domain (arginine- and serine-rich (RS) domain) can be programmed to recognize a splicing enhancer site and thereby promote the inclusion of a targeted exon. f, dRCas9 tethered to a fluorescent protein such as GFP can be used to observe RNA localization and transport in living cells.

[0801] Materials and Methods

[0802] Cas9 and Nucleic Acid Preparation

[0803] Wild-type Cas9 and catalytically inactive dCas9 (Cas9(D10A;H840A)) from S. pyogenes were purified as previously described (Jinek et al., Science. 2012 Aug. 17; 337(6096):816-21). Forty two-nucleotide crRNAs were either ordered synthetically (Integrated DNA Technologies) or transcribed in vitro with T7 polymerase using single-stranded DNA templates. Using the previously described numbering scheme (Jinek et al., Science. 2012 Aug. 17; 337(6096):816-21), tracrRNA was transcribed in vitro and contained nucleotides 15-87. Single-guide RNAs (sgRNAs) targeting 1-RNAs were transcribed in vitro from linearized plasmids and contain full-length crRNA and tracrRNA connected via a GAAA tetraloop insertion. GAPDH mRNA-targeting sgRNAs were transcribed in vitro from dsDNA PCR products. Target ssRNAs (55-56 nucleotides) were transcribed in vitro using single-stranded DNA templates. Sequences of all nucleic acid substrates used in this study can be found in Table 2.

[0804] All RNAs were purified using 10-15% denaturing polyacrylamide gel electrophoresis (PAGE). Duplexes of crRNA and tracrRNA were prepared by mixing equimolar concentrations of each RNA in hybridization buffer (20 mM Tris-HCl, pH7.5, 100 mM KCl, 5 mM MgCl₂), heating to 95° C. for 30 s and slow cooling. Fully double-stranded DNA/RNA substrates (substrates 1, 8-10 in FIG. 1 and substrates 1 and 2 in FIG. 4) were prepared by mixing equimolar concentrations of each nucleic acid strand in hybridization buffer, heating to 95° C. for 30 s, and slow cooling. RNA, DNA and chemically modified PAMmers were synthesized commercially (Intergrated DNA Technologies). DNA and RNA substrates were 5′-radiolabelled using [γ-³²P]ATP (PerkinElmer) and T4 polynucleotide kinase (New England Biolabs). Double-stranded DNA and dsRNA substrates (FIGS. 1c and 4c) were 5′-radiolabelled on both strands, whereas only the target ssRNA was 5′-radiolabelled in other experiments.

[0805] Cleavage Assays

[0806] Cas9-gRNA complexes were reconstituted before cleavage experiments by incubating Cas9 and the crRNA-tracrRNA duplex for 10 min at 37° C. in reaction buffer (20 mM Tris-HCl, pH7.5, 75 mM KCl, 5 mM MgCl₂, 1 mM dithiothreitol (DTT), 5% glycerol). Cleavage reactions were conducted at 37° C. and contained 1 nM 5′-radiolabelled target substrate, 100 nM Cas9-RNA, and 100 nM PAMmer, where indicated. Aliquots were removed at each time point and quenched by the addition of RNA gel-loading buffer (95% deionized formamide, 0.025% (w/v) bromophenol blue, 0.025% (w/v) xylene cyanol, 50 mM EDTA (pH 8.0), 0.025% (w/v) SDS). Samples were boiled for 10 min at 95° C. before being resolved by 12% denaturing PAGE. Reaction products were visualized by phosphorimaging and quantified with ImageQuant (GE Healthcare).

[0807] RNA Cleavage Site Mapping.

[0808] A hydrolysis ladder (OH2) was obtained by incubating, 25 nM 5′-radiolabelled λ2 target ssRNA in hydrolysis buffer (25 mM CAPS (N-cyclohexyl-3-aminopropanesulphonic acid), pH 10.0, 0.25 mM EDTA) at 95° C. for 10 min, before quenching on ice. An RNase T1 ladder was obtained by incubating, 25 nM 5′-radiolabelled λ2 target ssRNA with 1 U RNase T1 (New England Biolabs) for 5 min at 37° C. in RNase T1 buffer (20 mM sodium citrate, pH 5.0, 1 mM EDTA, 2 M urea, 0.1 mg/ml yeast transfer RNA). The reaction was quenched by phenol/chloroformextraction before adding RNA gel-loading buffer. All products were resolved by 15% denaturing PAGE.

[0809] Electrophoretic Mobility Shift Assays.

[0810] In order to avoid dissociation of the Cas9-gRNA complex at low concentrations during target ssRNA binding experiments, binding reactions contained a constant excess of dCas9 (300 nM), increasing concentrations of sgRNA, and 0.1-1 nM of target ssRNA. The reaction buffer was supplemented with 10 mg/ml heparin in order to avoid non-specific association of apo-dCas9 with target substrates. Reactions were incubated at 37° C. for 45 min before being resolved by 8% native PAGE at 4° C. (0.53 TBE buffer with 5 mM MgCl₂). RNA and DNA were visualized by phosphorimaging, quantified with ImageQuant (GE Healthcare), and analyzed with Kaleidagraph (Synergy Software).

[0811] Cas9 Biotin Labeling

[0812] To ensure specific labeling at a single residue on Cas9, two naturally occurring cysteine residues were mutated to serine (C80S and C574S) and a cysteine point mutant was introduced at residue Met 1. To attach the biotin moiety, 10 mM wild-type Cas9 or dCas9 was reacted with a 50-fold molar excess of EZ-LinkMaleimide-PEG2-Biotin (Thermo Scientific) at 25° C. for 2 h. The reaction was quenched by the addition of 10 mM DTT, and unreacted Maleimide-PEG2-Biotin was removed using a Bio-Gel P-6 column (Bio-Rad). Labeling was verified using a streptavidin bead binding assay, where 8.5 pmol of biotinylated Cas9 or non-biotinylated Cas9 was mixed with either 25 ml streptavidin-agarose (Pierce Avidin Agarose; Thermo Scientific) or 25 ml streptavidin magnetic beads (Dynabeads MyOne Streptavidin C1; Life Technologies). Samples were incubated in Cas9 reaction buffer at room temperature for 30 min, followed by three washes with Cas9 reaction buffer and elution in boiling SDS-PAGE loading buffer. Elutions were analyzed using SDS-PAGE. Cas9 M1C biotinylation was also confirmed using mass spectroscopy performed in the QB3/Chemistry Mass Spectrometry Facility at UC Berkeley. Samples of intact Cas9 proteins were analyzed using an Agilent 1200 liquid chromatograph equipped with a Viva C8 (100 mm 31.0 mm, 5 mm particles, Restek) analytical column and connected in-line with an LTQ OrbitrapXL mass spectrometer (Thermo Fisher Scientific). Mass spectra were recorded in the positive ion mode. Mass spectral deconvolution was performed using ProMass software (Novatia).

[0813] GAPDH mRNA Pull-Down

[0814] Total RNA was isolated from HeLa-S3 cells using Trizol reagent according to the manufacturer's instructions (Life Technologies). Cas9-sgRNA complexes were reconstituted before pull-down experiments by incubating a twofold molar excess of Cas9 with sgRNA for 10 min at 37° C. in reaction buffer. HeLa total RNA (40 μg) or HeLa lysate (˜5×10⁶ cells) was added to reaction buffer with 40U RNasin (Promega), PAMmer (5 mM)and the biotin-dCas9 (50 nM)-sgRNA (25 nM) in a total volume of 100 ml and incubated at 37° C. for 1 h. This mixture was then added to 25 ml magnetic streptavidin beads (Dynabeads MyOne Streptavidin C1; Life Technologies) pre-equilibrated in reaction buffer and agitated at 4° C. for 2 h. Beads were then washed six times with 300 ml wash buffer (20 mM Tris-HCl, pH7.5, 150 mM NaCl, 5 mM MgCl₂, 0.1% Triton X-100, 5% glycerol, 1 mM DTT, 10 mg/ml heparin) Immobilized RNA was eluted by heating beads at 70° C. in the presence of DEPC-treated water and a phenol/chloroform mixture. Eluates were then treated with an equal volume of glyoxal loading dye (Life Technologies) and heated at 50° C. for 1 h before separation via 1% BPTE agarose gel (30 mM Bis-Tris, 10 mM PIPES, 10 mM EDTA, pH 6.5). Following Northern blot transfers, membranes were crosslinked using UV radiation and incubated in pre-hybridization buffer (UltraHYB Ultrasensitive Hybridization Buffer; Life Technologies) for 1 h at 46° C. before hybridization. Radioactive northern probes were synthesized using random priming of GAPDH and β-actin partial cDNAs (for cDNA primers, see Table 2) in the presence of [α-³²P]dATP (PerkinElmer), using a Prime-It II Random Primer Labeling kit (Agilent Technologies). Hybridization was carried out for 3 h in pre-hybridization buffer at 46° C. followed by two washes with 23×SSC (300 mM NaCl, 30 mM trisodiumcitrate, pH 7, 0.5% (w/v) SDS) for 15 min at 46° C. Membranes were imaged using a phosphorscreen.

TABLE 2
RNA and DNA substrates used in Example 5 (all sequence are 5′ to 3′ unless
otherwise denoted).

| | | | SEQ ID |
|---|---|---|---|
| Description | Sequence^{a} | Used in: | NO: |
| Oligo for | TAATACGACTCACTATA | NA | 1404 |
| preparing | | | |
| dsDNA T7 | | | |
| promoter, in | | | |
| vitro | | | |
| transcription | | | |
| λ2-targeting | GUGAUAAGUGGAAUGCCAUGGUUUUAGA | FIG. 18c-e, | 1407 |
| crRNA | GCUAUGCUGUUUUG | 20a, 21c-d, | |
| | | 22, 23, | |
| | | 25a | |
| λ3-targeting | CUGGUGAACUUCCGAUAGUGGUUUUAGA | FIG. 20a | 1408 |
| crRNA | GCUAUGCUGUUUUG | | |
| λ4-targeting | CAGATATAGCCTGGTGGTTCGUUUUAGA | FIG. 20a | 1409 |
| crRNA | GCUAUGCUGUUUUG | | |
| ssDNA T7 | AAAAAGCACCGACTCGGTGCCACTTTTTCA | NA | 1415 |
| template^{b}: | AGTTGATAACGGACTAGCCTTATTTTAACT | | |
| tracrRNA | TGCTATGCTGTCCTATAGTGAGTCGTATT | | |
| | A | | |
| tracrRNA (nt | GGACAGCAUAGCAAGUUAAAAUAAGGCU | FIG. 18c-e, | 1416 |
| 15-87) | AGUCCGUUAUCAACUUGAAAAAGUGGCAC | 20a, 21c-d, | |
| | CGAGUCGGUGCUUUUU | 22, 23, | |
| | | 25a | |
| λ2-targeting | TAATACGACTCACTATAGGTGATAAGTGG | NA | 1479 |
| sgRNA | AATGCCATGGTTTTAGAGCTATGCTGTTTT | | |
| T7 template^{c} | GGAAACAAAACAGCATAGCAAGTTAAAAT | | |
| | AAGGCTAGTCCGTTATCAACTTGAAAAAGT | | |
| | GGCACCGAGTCGGTGCTTTTTTT | | |
| λ2-targeting | GGUGAUAAGUGGAAUGCCAUGGUUUUAG | FIG. 19, | 1480 |
| sgRNA | AGCUAUGCUGUUUUGGAAACAAAACAGCA | 20b,d, 24, | |
| | UAGCAAGUUAAAAUAAGGCUAGUCCGUU | 25b | |
| | AUCAACUUGAAAAAGUGGCACCGAGUCGG | | |
| | UGCUUUUUUU | | |
| λ2 target | 5′- | FIG. 18c, | 1419 |
| dsDNA | GAGTGGAAGGATGCCAGTGATAAGTGGAA | 19a, 25c | |
| duplex | TGCCATGTGGGCTGTCAAAATTGAGC-3′ | | |
| | 3′- | | 1420 |
| | CTCACCTTCCTACGGTCACTATTCACCTTA | | |
| | CGGTACACCCGACAGTTTTAACTCG-5′ | | |
| λ2 ssDNA | 3′- | FIG. 18c, | 1481 |
| target strand | CTCACCTTCCTACGGTCACTATTCACCTTA | 19a, | |
| (used to make | CGGTACACCCGACAGTTTTAACTCG-5′ | | |
| heteroduplex | | | |
| DNA:RNA) | | | |
| 2λ2 ssDNA | GAGTGGAAGGATGCCAGTGATAAGTGGAA | FIG. 18c, | 1463 |
| non-target | TGCCATGTGGGCTGTCAAAATTGAGC | 19a, 20d, 24 | |
| strand | | | |
| (used to make | | | |
| heteroduplex | | | |
| DNA:RNA) | | | |
| λ2 ssRNA | GAGTGGAAGGATGCCAGTGATAAGTGGAA | NA | 1482 |
| target strand | TGCCATGTGGGCTGTCAAAATTGAGCCTAT | | |
| T7 template | AGTGAGTCGTATTA | | |
| λ2 ssRNA | 3′- | FIG. 18c-e, | 1483 |
| target strand | CUCACCUUCCUACGGUCACUAUUCACCUU | 19-25 | |
| | ACGGUACACCCGACAGUUUUAACUCGG-5′ | | |
| λ2 ssRNA | GCTCAATTTTGACAGCCCACATGGCATTCC | NA | 1484 |
| non-target | ACTTATCACTGGCATCCTTCCACTCCTATA | | |
| strand | GTGAGTCGTATTA | | |
| T7 template | | | |
| λ2 ssRNA | GGAGTGGAAGGATGCCAGTGATAAGTGGA | FIG. 18c, | 1485 |
| non-target | ATGCCATGTGGGCTGTCAAAATTGAGC | 19a | |
| strand | | | |
| (used to make | | | |
| dsRNA) | | | |
| 19 nt λ2 DNA | TGGGCTGTCAAAATTGAGC | FIG. 18c-e, | 1466 |
| PAMmer | | 19, 20a-b, | |
| | | 22-25 | |
| 18 nt λ2 ″GG″ | GGGCTGTCAAAATTGAGC | FIG. 18c, | 1486 |
| PAMmer | | 19 | |
| 19 nt λ2 DNA | ACCGCTGTCAAAATTGAGC | FIG. 18c, | 1487 |
| mutated | | 19c | |
| PAMmer | | | |
| 16 nt λ2 DNA | GCTGTCAAAATTGAGC | FIG. 18c, | 1465 |
| ″PAM-less″ | | 19c | |
| PAMmer | | | |
| 18 nt λ2 RNA | GGGCUGUCAAAAUUGAGC | FIG. 18c, | 1488 |
| PAMmer | | 19a | |
| 5 nt λ2 DNA | TGGGC | FIG. 18e, | |
| PAMmer | | 19c | |
| 10 nt λ2 DNA | TGGGCTGTCA | FIG. 18e, | 1489 |
| PAMmer | | 19c | |
| 15 nt λ2 DNA | TGGGCTGTCAAAATT | FIG. 18e, | 1490 |
| PAMmer | | 19c | |
| λ3 ssRNA | AACGTGCTGCGGCTGGCTGGTGAACTTCCG | NA | 1491 |
| target strand | ATAGTGCGGGTGTTGAATGATTTCCTATAG | | |
| T7 template | TGAGTCGTATTA | | |
| λ3 ssRNA | 3′- | FIG. | 1492 |
| target strand | UUGCACGACGCCGACCGACCACUUGAAG | 20a,b,d, 24, | |
| | GCUAUCACGCCCACAACUUACUAAAGG-5′ | 25b | |
| λ4 ssRNA | TCACAACAATGAGTGGCAGATATAGCCTGG | NA | 1493 |
| target strand | TGGTTCAGGCGGCGCATTTTTATTGCCTAT | | |
| T7 template | AGTGAGTCGTATTA | | |
| λ4 ssRNA | 3′- | FIG. | 1494 |
| target strand | AGUGUUGUUACUCACCGUCUAUAUCGGA | 20a,b,d, 24 | |
| | CCACCAAGUCCGCCGCGUAAAAAUAACG | | |
| | G-5′ | | |
| λ3 ssDNA | AACGTGCTGCGGCTGGCTGGTGAACTTCCG | FIG. 20d, | 1421 |
| non-target | ATAGTGCGGGTGTTGAATGATTTCC | 24 | |
| strand | | | |
| λ4 ssDNA | TCACAACAATGAGTGGCAGATATAGCCTGG | FIG. 20d, | 1423 |
| non-target | TGGTTCAGGCGGCGCATTTTTATTG | 24 | |
| strand | | | |
| 19 nt λ3 DNA | CGGGTGTTGAATGATTTCC | FIG. | 1495 |
| PAMmer | | 20a,b,d, 24, | |
| 25 | | | |
| 19 nt λ4 DNA | AGGCGGCGCATTTTTATTG | FIG. | 1496 |
| PAMmer | | 20a,b,d, 24 | |
| 21 nt λ2 | 5′-TGTGGGCTGTCAAAATTGAGC | FIG. 21c, | 1497 |
| extended | | 25a,b | |
| DNA | | | |
| PAMmer | | | |
| 21 nt λ3 | 5′-TGCGGGTGTTGAATGATTTCC | 25b | 1498 |
| extended | | | |
| DNA | | | |
| PAMmer | | | |
| 24 nt λ2 | 5′-CCATGTGGGCTGTCAAAATTGAGC | 25a,b | 1499 |
| extended | | | |
| DNA | | | |
| PAMmer | | | |
| 24 nt λ3 | 5′-TAGTGCGGGTGTTGAATGATTTCC | 25b | 1500 |
| extended | | | |
| DNA | | | |
| PAMmer | | | |
| 27 nt λ2 | 5′-ATGCCATGTGGGCTGTCAAAATTGAGC | FIG. | 1501 |
| extended | | 21f,g, 25a,b | |
| DNA | | | |
| PAMmer | | | |
| 27 nt λ3 | 5′-CGATAGTGCGGGTGTTGAATGATTTCC | 25b | 1502 |
| extended | | | |
| DNA | | | |
| PAMmer | | | |
| 30 nt λ2 | 5′-GGAATGCCATGTGGGCTGTCAAAATTGAG | 25a,b | 1503 |
| extended | C | | |
| DNA | | | |
| PAMmer | | | |
| 30 nt λ3 | 5′-TTCCGATAGTGCGGGTGTTGAATGATTTCC | 25b | 1504 |
| extended | | | |
| DNA | | | |
| PAMmer | | | |
| 33 nt λ2 | 5′-AGTGGAATGCCATGTGGGCTGTCAAAATT | 25a,b | 1505 |
| extended | GAGC | | |
| DNA | | | |
| PAMmer | | | |
| 33 nt λ3 | 5′-AACTTCCGATAGTGCGGGTGTTGAATGATT | 25b | 1506 |
| extended | TCC | | |
| DNA | | | |
| PAMmer | | | |
| 36 nt λ2 | 5′-ATAAGTGGAATGCCATGTGGGCTGTCAAA | 25a | 1507 |
| extended | ATTGAGC | | |
| DNA | | | |
| PAMmer | | | |
| 39 nt λ2 | 5′-GTGATAAGTGGAATGCCATGTGGGCTGTC | 25a,b | 1508 |
| extended | AAAATTGAGC | | |
| DNA | | | |
| PAMmer | | | |
| 39 nt λ3 | 5′-CTGGTGAACTTCCGATAGTGCGGGTGTTGA | 25b | 1509 |
| extended | ATGATTTCC | | |
| DNA | | | |
| PAMmer | | | |
| non-PAM λ2 | 5′- | FIG. 21c | 1510 |
| dsDNA | GAGTGGAAGGATGCCAGTGATAAGTGGAA | | |
| | TGCCATGACCGCTGTCAAAATTGAGC-3′ | | |
| | 3′- | | 1511 |
| | CTCACCTTCCTACGGTCACTATTCACCTTA | | |
| | CGGTACTGGCGACAGTTTTAACTCG-5′ | | |
| non-PAM λ2 | GAGTGGAAGGATGCCAGTGATAAGTGGAA | NA | 1512 |
| ssRNA target | TGCCATGACCGCTGTCAAAATTGAGCCTAT | | |
| strand T7 | AGTGAGTCGTATTA | | |
| template | | | |
| non-PAM λ2 | 3′- | FIG. 21c | 1513 |
| ssRNA target | CUCACCUUCCUACGGUCACUAUUCACCUU | | |
| strand | ACGGUACTGGCGACAGUUUUAACUCGG-5′ | | |
| λ2 2′ OMe | *UGGGCTGTCAAAATTGAG*C | 27 | 1514 |
| capped | | | |
| PAMmer^{d} | | | |
| λ2 PS capped | T*GGGCTGTCAAAATTGAG*C | 27 | 1515 |
| PAMmer^{d} | | | |
| | *UGGGCTGTCAAAATTGAG*C | 27 | 1516 |
| λ2 2′F capped | | | |
| PAMmer^{d} | | | |
| λ2 LNA | *TGGGCTGTCAAAATTGAG*C | 27 | 1517 |
| capped | | | |
| PAMmer^{d} | | | |
| λ2 19 nt | *UGGGC*UGTCA*AAATT*GAG*C | 27 | 1518 |
| 2′ OMe | | | |
| interspersed | | | |
| PAMmer^{d} | | | |
| GAPDH-tar- | TAATACGACTCACTATAGGGGCAGAGATG | FIG. | 1519 |
| geting sgRNA | ATGACCCTGTTTAAGAGCTATGCTGGAAAC | 21f,g, 28 | |
| 1 | AGCATAGCAAGTTTAAATAAGGCTAGTCCG | | |
| T7 template^{e} | TTATCAACTTGAAAAAGTGGCACCGAGTCG | | |
| | GTGCTTTTTTT | | |
| GAPDH- | GGGGCAGAGAUGAUGACCCUGUUUAAGA | FIG. | 1520 |
| targeting | GCUAUGCUGGAAACAGCAUAGCAAGUUUA | 21f,g, 28 | |
| sgRNA 1 | AAUAAGGCUAGUCCGUUAUCAACUUGAAA | | |
| | AAGUGGCACCGAGUCGGUGCUUUUUUU | | |
| GAPDH- | TAATACGACTCACTATAGGCCAAAGTTGT | FIG. 21f, | 1521 |
| targeting | CATGGATGACGTTTAAGAGCTATGCTGGAA | 28 | |
| sgRNA 2 | ACAGCATAGCAAGTTTAAATAAGGCTAGTC | | |
| T7 template^{e} | CGTTATCAACTTGAAAAAGTGGCACCGAGT | | |
| | CGGTGCTTTTTTT | | |
| GAPDH- | GGCCAAAGUUGUCAUGGAUGACGUUUAA | FIG. 21f, | 1522 |
| targeting | GAGCUAUGCUGGAAACAGCAUAGCAAGUU | 28 | |
| sgRNA 2 | UAAAUAAGGCUAGUCCGUUAUCAACUUGA | | |
| | AAAAGUGGCACCGAGUCGGUGCUUUUUUU | | |
| GAPDH- | TAATACGACTCACTATAGGCCAAAGTTGT | FIG. 21f, | 1521 |
| targeting | CATGGATGACGTTTAAGAGCTATGCTGGAA | 28 | |
| sgRNA 3 | ACAGCATAGCAAGTTTAAATAAGGCTAGTC | | |
| T7 template^{e} | CGTTATCAACTTGAAAAAGTGGCACCGAGT | | |
| | CGGTGCTTTTTTT | | |
| GAPDH- | GGAUGUCAUCAUAUUUGGCAGGGUUUAA | FIG. 21f, | 1523 |
| targeting | GAGCUAUGCUGGAAACAGCAUAGCAAGUU | 28 | |
| sgRNA 3 | UAAAUAAGGCUAGUCCGUUAUCAACUUGA | | |
| | AAAAGUGGCACCGAGUCGGUGCUUUUUUU | | |
| GAPDH- | TAATACGACTCACTATAGGATGTCATCAT | FIG. 21f, 28 | 1524 |
| targeting | ATTTGGCAGGGTTTAAGAGCTATGCTGGAA | | |
| sgRNA 4 | ACAGCATAGCAAGTTTAAATAAGGCTAGTC | | |
| T7 template^{e} | CGTTATCAACTTGAAAAAGTGGCACCGAGT | | |
| | CGGTGCTTTTTTT | | |
| GAPDH- | GGATGTCATCATATTTGGCAGGGTTTAAGA | FIG. 21f, 28 | 1525 |
| targeting | GCTATGCTGGAAACAGCATAGCAAGTTTAA | | |
| sgRNA 4 | ATAAGGCTAGTCCGTTATCAACTTGAAAAA | | |
| | GTGGCACCGAGTCGGTGCTTTTTTT | | |
| GAPDH | ATGACCCTTGGGGCTCCCCCCTGCAAA | FIG. 21,f,g | 1526 |
| PAMmer 1 | | 28 | |
| GAPDH | TGGATGACCGGGGCCAGGGGTGCTAAG | FIG. 21f, 28 | 1527 |
| PAMmer 2 | | | |
| GAPDH | TTGGCAGGTGGTTCTAGACGGCAGGTC | FIG. 21f,28 | 1528 |
| PAMmer 3 | | | |
| GAPDH | CCCCAGCGTGGAAGGTGGAGGAGTGGG | FIG. 21f, 28 | 1529 |
| PAMmer 4 | | | |
| GAPDH | A*UGACC*CTAGG*GGCTC*CCCCC*UGCAA | FIG. 21g, 28 | 1474 |
| PAMmer 1 | *A | | |
| 2′OMe v1 | | | |
| GAPDH | *ATG*ACCC*UAGG*GGCT*CCCC*CCTG*CA | FIG. 21g, 28 | 1475 |
| PAMmer 1 | A*A | | |
| 2′OMe v2 | | | |
| GAPDH | *ATG*ACC*CU*AGG*GGC*UCC*CCC*CTG* | FIG. 21g, 28 | 1476 |
| PAMmer 1 | CAA*A | | |
| 2′OMe v3 | | | |
| GAPDH | *AT*GA*CC*CT*AGG*GG*CT*CC*CC*CC*U | FIG. 21g, 28 | 1477 |
| PAMmer 1 | G*CA*AA | | |
| 2′OMe v4 | | | |
| GAPDH | *AT*GA*CC*CT*AG*GG*GC*TC*CC*CC*CU | FIG. 21g, 28 | 1530 |
| PAMmer 1 | *GC*AA*A | | |
| 2′OMe v5 | | | |
| GAPDH | CTCACTGTTCTCTCCCTCCGC | FIG. 21g,f | 1531 |
| cDNA primer | | | |
| Fwd | | | |
| GAPDH | AGGGGTCTACATGGCAACTG | FIG. 21g,f | 1532 |
| cDNA primer | | | |
| Rev | | | |
| β-actin cDNA | AGAAAATCTGGCACCACACC | FIG. 21g,f | 1533 |
| primer Fwd | | | |
| β-actin cDNA | GGAGTACTTGCGCTCAGGAG | FIG. 21g,f | 1534 |
| primer Rev | | | |

*Guide crRNA sequences and complementary DNA target strand sequences are shown in red.
PAM sites (5′-NGG-3′) are highlighted in yellow on the non-target strand when adjacent to the target sequence or in the PAMmer oligonucleotides.
†The T7 promoter is indicated in bold (or reverse complement of), as well as 5′ G or GG included in the ssRNA product by T7 polymerase.
NA, not applicable.
‡sgRNA template obtained from pIDT, subsequently linearised by AflII for run-off transcription.
§Positions of modifications depicted with asterisks preceding each modified nucleotide in each case (except for PS linkages which are depicted between bases)
PS: phosphorothioate bond
LNA: locked nucleic acid

### Example 6

### Use of Quenched PAMmers

[0815] The following demonstrates the labeling of single stranded target nucleic acids using a quenched PAMmer. This provides a low-background single-stranded nucleic acid detection system, in this example case based on a quenched PAMmer having a fluorescent detectable label and a quencher moiety. “F” is the detectable label in this example and is a fluorescent dye, which can be attached to the PAMmer in a variety of ways (e.g., through an amino-dT nucleotide and a NHS-ester containing dye or as a replacement for a nucleotide (internal Cy5)). “Q” is the quencher moiety. The quencher moiety in this example is attached 5′ of the fluorescent moiety. The quenched PAMmer is sometimes referred to in this example as an “FQ PAMmer.”

[0816] When uncleaved (e.g., when not yet bound to its target nucleic acid, or when bound but uncleaved), the FQ PAMmer, which contains a quenchable detectable label (e.g., a fluorophore) (e.g., 3′ of the Cas9 RuvC domain cleavage site) that is quenched by a quencher moiety (e.g., present 5′ of the cleavage site). Thus, when uncleaved, the FQ PAMmer produces little signal (e.g., little to no fluorescent signal). Upon concomitant hybridization of the FQ PAMmer sequence and guide RNA (e.g., guide-RNA) specific recognition and cleavage by Cas9 will the signal (e.g., fluorescent signal) is observed. Cleavage by Cas9 hydrolyses a phosphodiester bond positioned somewhere between the quenchable detectable label (e.g., the fluorophore) and the quencher moiety, allowing the quencher moiety to diffuse away from the single stranded target nucleic acid. Cas9 cleavage of the PAMmer can be predicated based on complementarity between the guide RNA (e.g., guide RNA) and the single stranded target nucleic acid.

[0817] The quenched PAMmer used in this particular example is shown in FIG. 30B, with a more detailed look at the internal Cy5 attachment chemistry in FIG. 30C. Using the FQ PAMmer shown in FIG. 30B, a time-dependent increase in fluorescence was observed only when Cas9 (H840A) was in the presence of a single stranded target (an RNA target in this case) (FIG. 30D and FIG. 30E), indicating that the RuvC catalytic activity (The RuvC domain of the Cas9 protein) is responsible for the de-quenching of the quenched PAMmer. A variety of PAMmer designs (which can include different fluorescent dyes and quencher moieties, attachment chemistries, attachment positions and PAMmer nucleotide lengths and compositions) can yield even better performing quenched PAMmers.

[0818] It should be noted that upon hybridization to the target single stranded RNA, the FQ PAMmer became partially de-quenched, leading to a time-independent increase in fluorescence (FIG. 30D). This is likely due to the ordering of the PAMmer through duplex formation, which effectively increases the length between the fluorophore and the quencher, leading to an increase in fluorescence signal. This effect can be reduced by reducing the number of nucleotides between the fluorophore and quencher moiety.

[0819] FIG. 29. Cas9 complexed with a Cas9 guide RNA (gRNA) is able to cleave PAMmers with 5′ extensions. (A) Cas9 (H840A)-gRNA cleaved DNA PAMmers containing 8 nt 5′ extensions when hybridized to ssDNA or ssRNA targets when the PAMmer was base-paired or mismatched to the target strand. Cleavage assays were performed with 100 nM Spy Cas9:RNA in the presence of about 1 nM 3′-³²P-labeled 27 nt PAMmers mixed with a either DNA or RNA targets. Time points were taken at 0, 5, 30, 60 minutes and immediately stopped with formamide-EDTA buffer. Samples were resolved on a 12% urea-PAGE gel and visualized using a phoshorimager. (B) The major PAMmer cleavage product depended on the target nucleic acid identity. Cleavage sites are indicated by colored arrows.

[0820] FIG. 30. Quenched PAMmers facilitate specific Cas9 cleavage-mediated fluorescence detection of target nucleic acids. (A) Schematic diagram depicting the approach to use quenched PAMmers to detect single-stranded nucleic acid targets in a Cas9 guide RNA-specific manner (B) Schematic depicting one embodiment of a quenched PAMmer design for targeting single stranded target nucleic acids (e.g., single stranded target RNA). In this embodiment, an internal Cy5 dye is placed 3′ of the Cas9 H840A cleavage site of the quenched PAMmer and the 5′ end of the quenched PAMmer contains an Iowa Black RQ quencher moiety. (C) A closer look at the internal Cy5 linkage chemistry for the quenched PAMmer design in B. An arrow depicts the predicted Cas9 H840A cleavage site. The chemical structure of the Iowa Black RQ quencher (shown as a circle) is proprietary (IDT technologies). (D) Time course of the quenched PAMmer (see A-C) cleavage reaction by Cas9 H840A and RQ1 DNase (as a positive control). Cleavage assays were carried out using 25 nM quenched PAMmer in the presence of 100 nM Cas9 H840A and 500 nM target RNA. 1U RQ1 DNase and 25 nM quenched PAMmer was used as a positive control. Fluorescence was measured at 612 nm and 670 nm at five minute time points for 90 minutes. (E) End point fluorescence measurements (at 90 minutes) of the data collected in D.

### Example 7

### Use of Quenched PAMmers

[0821] The following are tables (Table 3 and Table 4) and plots of the data therein (FIG. 32 and FIG. 33, respectively) depicting accumulated data using quenched PAMmers to label RNA targets.

[0822] FIG. 32 RCas9 (CRISPR/Cas9 directed for RNA-guided ssRNA binding and/or cleavage)-mediated fold-change in fluorescence for quenched PAMmers tested in Table 3. For quenched PAMmers tested in two independent experiments, error bars represent the range between measurements, while for quenched PAMmers tested in three or more independent experiments, error bars represent the standard deviation between measurements. See Table 3 for more details (including individual data points) for each quenched PAMmer.

[0823] FIG. 33 RCas9 (CRISPR/Cas9 directed for RNA-guided ssRNA binding and/or cleavage)-mediated fold-change in fluorescence for quenched PAMmers tested in Table 4. For quenched PAMmers tested in two independent experiments, error bars represent the range between measurements, while for quenched PAMmers tested in three or more independent experiments, error bars represent the standard deviation between measurements. See Table 4 for more details (including individual data points) for each quenched PAMmer.

TABLE 3
Quenched PAMmer 2′OH sugar and phosphodiester-linkage modification
tolerance. Fluorescence fold-change values were obtained by calculating the
fold-change difference between raw fluorescence values for samples containing
quenched-PAMmer:RNA-target:RCas9 and samples containing quenched-PAMmer:
target-RNA at the end of each time-course. Abbreviations for fluorophores,
quenchers and modified nucluotides are as follows: iCy5: internal Cy5
fluorophore, replaces a complete nucleotide; Q: 5-prime quencher; mX: 2′-O-
methyl(2′OMe)-modified nucleotide ′X′; fX: 2′F-modified nucleotide ′X′; *
depicts a phosphorothioate linkage between neighbouring bases. 3SpC3; 3-prime
C3-akyl moiety.

| SEQ | | | Fold- | Avg | |
|---|---|---|---|---|---|
| ID | | | change | Fold- | Range/ |
| NO | ID | Sequence | range | change | SD |
| 1597 | MOC | Q/ATGCCAT/iCy5/TGGGCTGTCAAAATTGA | 7.6-7.9 | 7.63 | 0.25 |
| | -406 | GC | | | |
| 1598 | MOC | Q/ATGCCAT/iCy5/TGGGfCTfGTfCAfAAfATf | 3.4 | 3.32 | 0.20 |
| | -423 | UGfAGfC | | | |
| 1599 | MOC | Q/ATGCCAT/iCy5/TGGGmCTmGTmCAmAA | 1.8 | 1.83 | 0.00 |
| | -424 | mATmUGmAGmC | | | |
| 1600 | MOC | Q/ATGCCAT/iCy5/TGGGCTfGTfCAfAAfATf | 5.9 | 5.90 | 0.00 |
| | -428 | UGfAGfC | | | |
| 1601 | MOC | Q/ATGCCAT/iCy5/TGGGfCTfGTfCAfAAfATf | 3 | 3.00 | 0.00 |
| | -429 | UG*fA*G*fC | | | |
| 1602 | MOC | Q/ATGCCAT/iCy5/TGGGfCTfGTfCAfAAfAT | 2.9 | 2.90 | 0.00 |
| | -430 | UG*fA*G*fC/3SpC3 | | | |
| 1603 | MOC | Q/ATGCCAT/iCy5/T*G*G*G*fC*T*fG*T*fC* | 5.4-5.9 | 5.63 | 0.25 |
| | -431 | A*fA*A*fA*T*fU*G*fA*G*fC | | | |
| 1604 | MOC | Q/ATGCCAT/iCy5/T*G*G*G*C*TmG*T*mC* | 4.6-7.6 | 6.20 | 1.09 |
| | -442 | A*mA*A*mA*T*mU*G*mA*G*mC | | | |
| 1605 | MOC | Q/ATGCCAT/iCy5/T*G*G*G*C*T*fG*T*fC* | 5.4-6.4 | 5.90 | 0.10 |
| | -443 | A*fA*A*fA*T*fU*G*fA*G*fC | | | |
| 1606 | MOC | Q/A*T*G*C*CAT/iCy5/T*G*G*G*C*T*fG*T | 2.5-4.3 | 3.40 | 1.80 |
| | 444 | *fC*A*fA*A*fA*T*fU*G*fA*G*fC | | | |
| 1607 | MOC | Q/mATGCCAT/iCy5/T*G*G*G*C*T*mG*T* | 5.7 | 5.70 | 0.00 |
| | -446 | mC*A*mA*A*mA*T*mU*G*mA*G*mC | | | |
| 1608 | MOC | Q/AmUGCCAT/iCy5/T*G*G*G*C*T*mG*T* | 7.2 | 7.20 | 0.00 |
| | -447 | mC*A*mA*A*mA*T*mU*G*mA*G*mC | | | |
| 1609 | MOC | Q/ATmGCCAT/iCy5/T*G*G*G*C*T*mG*T* | 4.9 | 4.90 | 0.00 |
| | -448 | mC*A*mA*A*mA*T*mU*G*mA*G*mC | | | |
| 1610 | MOC | Q/ATGmCCAT/iCy5/T*G*G*G*C*T*mG*T* | 3.8 | 3.80 | 0.00 |
| | -449 | mC*A*mA*A*mA*T*mU*G*mA*G*mC | | | |
| 1611 | MOC | Q/ATGCmCAT/iCy5/T*G*G*G*C*T*mG*T* | 2.3 | 2.30 | 0.00 |
| | -450 | mC*A*mA*A*mA*T*mU*G*mA*G*mC | | | |
| 1612 | MOC | Q/ATGCCmAT/iCy5/T*G*G*G*C*T*mG*T* | 4 | 4.00 | 0.00 |
| | -451 | mC*A*mA*A*mA*T*mU*G*mA*G*mC | | | |
| 1613 | MOC | Q/ATGCCAmU/iCy5/T*G*G*G*C*T*mG*T* | 4.1 | 4.10 | 0.00 |
| | -452 | mC*A*mA*A*mA*T*mU*G*mA*G*mC | | | |
| 1614 | MOC | Q/ATGCCAT/iCy5/T*G*G*G*mC*T*mG*T* | 3-3.6 | 3.30 | 0.60 |
| | -453 | mC*A*mA*A*mA*T*mU*G*mA*G*mC | | | |
| 1615 | MOC | Q/ATGCCAT/iCy5/T*G*G*mG*C*mU*G*mU | 3.1-3.8 | 3.45 | 0.70 |
| | 454 | *C*mA*A*mA*A*mU*T*mG*A*mG*C | | | |
| 1616 | MOC | Q/A*T*G*CCAT/iCy5/T*G*G*mG*C*mU*G* | 3.7-4.8 | 4.25 | 0.90 |
| | -455 | mU*C*mA*A*mA*A*mU*T*mG*A*mG*C | | | |
| 1617 | MOC | Q/A*T*G*CCAT/iCy5/T*G*G*G*C*T*mG*T | 3.9-4.8 | 4.35 | 0.90 |
| | -456 | *mC*A*mA*A*mA*T*mU*G*mA*G*mC | | | |
| 1618 | MOC | Q/A*T*G*CCAT/iCy5/T*G*G*G*mC*T*mG* | 4.1-5.1 | 4.60 | 0.10 |
| | -457 | T*mC*A*mA*A*mA*T*mU*G*mA*G*mC | | | |

TABLE 4
Quenched PAMmer fluorophore-quencher spacing study. Fluorescence fold-
change values were obtained by calculating the fold-change difference between
raw fluorescence values for samples containing quenched-PAMmer:RNA-target:
RCas9 and samples containing quenched-PAMmer:target-RNA at the end of each
time-course. Abbreviations for fluorophores and quenchers : iCy5: internal
Cy5 fluorophore, replaces a complete nucleotide; IATTO647NN: internal ATTO-
647 fluorescent dye, which is conjugated to a T nucleotide; iCF64ORN: Biotium
CF 640R fluorescent dye, which is conjugated to a T nucleotide; 5IAbRQ: 5-
prime Iowa-Black RQ quencher; iIB-QB: internal Iowa-Black RQ quencher;
5IAbkFQ: internal Iowa-Black FQ Quencher; ZEN: IDT ZEN quencher.

| SEQ | | | Fold- | Avg | |
|---|---|---|---|---|---|
| ID | | | change | Fold- | Range/ |
| NO | ID | Sequence | range | change | SD |
| 1619 | MOC- | 5IAbRQ/ATGCCAT/iCy5/TGGGCTGTCAA | 3.0-4.4 | 3.62 | 0.44 |
| | 280 | AATTGAGC | | | |
| 1620 | MOC- | 5IAbRQ/ATGCCA/iCy5/GTGGGCTGTCAA | 1.5 | 1.50 | 0.00 |
| | 281 | AATTGAGC | | | |
| 1621 | MOC- | 5IAbRQ/CCAT/iCy5/TGGGCTGTCAAAAT | 6.0-10.5 | 7.25 | 2.46 |
| | 323 | TGAGC | | | |
| 1622 | MOC- | 5IAbRQ/AT/iCy5/TGGGCTGTCAAAATTG | 1.1 | 1.12 | 0.04 |
| | 324 | AGC | | | |
| 1623 | MOC- | 5IAbRQ/CCAT/IATT0647NN/TGGGCTGT | 11.8- | 13.16 | 2.75 |
| | 325 | CAAAATTGAGC | 14.5 | | |
| 1624 | MOC- | 5IAbRQ/ATGCCAG/iCy5/TGGGCTGTCAA | 2.6-3.0 | 2.79 | 0.39 |
| | 334 | AATTGAGC | | | |
| 1625 | MOC- | AATG/iIB- | 6.5-7.5 | 7.02 | 1.00 |
| | 335 | QB/CCAT/iCy5/TGGGCTGTCAAAATTGA | | | |
| | | GC | | | |
| 1626 | MOC- | AATG/ZEN/CCAT/iCy5/TGGGCTGTCAA | 1.5-1.6 | 1.54 | 0.10 |
| | 336 | AATTGAGC | | | |
| 1627 | MOC- | 5IAbRQ/ZEN/ATGCCAT/iCy5/TGGGCTGT | 4.8-5.2 | 5.00 | 0.40 |
| | 337 | CAAAATTGAGC | | | |
| 1628 | MOC- | 5IAbRQ/ATGCCATGTGGGC/IATTO647N | 1.2-1.3 | 1.29 | 0.10 |
| | 338 | N/GTCAAAATTGAGC | | | |
| 1629 | MOC- | 5IAbRQ/ZEN/CCAT/iCy5/TGGGCTGTCAA | 5.9 | 5.90 | 0.00 |
| | 353 | AATTGAGC | | | |
| 1630 | MOC- | 5IAbRQ/CAT/iCy5/TGGGCTGTCAAAATT | 2.9 | 2.90 | 0.00 |
| | 354 | GAGC | | | |
| 1631 | MOC- | 5IAbRQ/GCCAT/iCy5/TGGGCTGTCAAAA | 5.0 | 5.00 | 0.00 |
| | 355 | TTGAGC | | | |
| 1632 | MOC- | 5IAbRQ/ATG/ZEN/CCAT/iCy5/TGGGCTG | 3.4 | 3.40 | 0.00 |
| | 356 | TCAAAATTGAGC | | | |
| 1633 | MOC- | 5IABkFQ/IAbRQ/CCAT/iCy5/TGGGCTGT | 4.2 | 4.20 | 0.00 |
| | 388 | CAAAATTGAGC | | | |
| 1634 | MOC- | 5IAbRQ/CCAT/1CF640RN/TGGGCTGTCA | 5.3-8.7 | 6.22 | 2.17 |
| | 401 | AAATTGAGC | | | |
| 1635 | MOC- | 5IAbRQ/CAT/iCF640RN/TGGGCTGTCAA | 6.5-8.5 | 6.59 | 1.86 |
| | 432 | AATTGAGC | | | |
| 1636 | MOC- | 5IAbRQ/GCCAT/iCF640RN/TGGGCTGTC | 3.8-4 | 3.90 | 0.20 |
| | 433 | AAAATTGAGC | | | |
| 1637 | MOC- | 5IAbRQ/TGCCAT/iCF640RN/TGGGCTGT | 3.3-4.5 | 3.90 | 1.20 |
| | 434 | CAAAATTGAGC | | | |

[0824] While the present invention has been described with reference to the specific embodiments thereof, it should be understood by those skilled in the art that various changes may be made and equivalents may be substituted without departing from the true spirit and scope of the invention. In addition, many modifications may be made to adapt a particular situation, material, composition of matter, process, process step or steps, to the objective, spirit and scope of the present invention. All such modifications are intended to be within the scope of the claims appended hereto.

The application's sequence listing, which the Patent Office published only in electronic form, follows.

SEQUENCE LISTING (1596 sequences)

SEQ ID NO: 1 - protein, 1056 aa, Pasteurella multocida
MQTTNLSYILGLDLGIASVGWAVVEINENEDPIGLIDVGVRIFERAEVPKTGESLALSRRLARSTRRLIRRRAHRLLLAKRFLKREGILSTIDLEKGLPNQAWELRVAGLERRLSAIEWGAVLLHLIKHRGYLSKRKNESQTNNKELGALLSGVAQNHQLLQSDDYRTPAELALKKFAKEEGHIRNQRGAYTHTFNRLDLLAELNLLFAQQHQFGNPHCKEHIQQYMTELLMWQKPALSGEAILKMLGKCTHEKNEFKAAKHTYSAERFVWLTKLNNLRILEDGAERALNEEERQLLINHPYEKSKLTYAQVRKLLGLSEQAIFKHLRYSKENAESATFMELKAWHAIRKALENQGLKDTWQDLAKKPDLLDEIGTAFSLYKTDEDIQQYLTNKVPNSVINALLVSLNFDKFIELSLKSLRKILPLMEQGKRYDQACREIYGHHYGEANQKTSQLLPAIPAQEIRNPVVLRTLSQARKVINAIIRQYGSPARVHIETGRELGKSFKERREIQKQQEDNRTKRESAVQKFKELFSDFSSEPKSKDILKFRLYEQQHGKCLYSGKEINIHRLNEKGYVEIDHALPFSRTWDDSFNNKVLVLASENQNKGNQTPYEWLQGKINSERWKNFVALVLGSQCSAAKKQRLLTQVIDDNKFIDRNLNDTRYIARFLSNYIQENLLLVGKNKKNVFTPNGQITALLRSRWGLIKARENNNRHHALDAIVVACATPSMQQKITRFIRFKEVHPYKIENRYEMVDQESGEIISPHFPEPWAYFRQEVNIRVFDNHPDTVLKEMLPDRPQANHQFVQPLFVSRAPTRKMSGQGHMETIKSAKRLAEGISVLRIPLTQLKPNLLENMVNKEREPALYAGLKARLAEFNQDPAKAFATPFYKQGGQQVKAIRVEQVQKSGVLVRENNGVADNASIVRTDVFIKNNKFFLVPIYTWQVAKGILPNKAIVAHKNEDEWEEMDEGAKFKFSLFPNDLVELKTKKEYFFGYYIGLDRATGNISLKEHDGEISKGKDGVYRVGVKLALSFEKYQVDELGKNRQICRPQQRQPVR

SEQ ID NO: 2 - protein, 1368 aa, Streptococcus pyogenes [sequence omitted]

SEQ ID NO: 3 - protein, 1334 aa, Listeria innocua
MKKPYTIGLDIGTNSVGWAVLTDQYDLVKRKMKIAGDSEKKQIKKNFWGVRLFDEGQTAADRRMARTARRRIERRRNRISYLQGIFAEEMSKTDANFFCRLSDSFYVDNEKRNSRHPFFATIEEEVEYHKNYPTIYHLREELVNSSEKADLRLVYLALAHIIKYRGNFLIEGALDTQNTSVDGIYKQFIQTYNQVFASGIEDGSLKKLEDNKDVAKILVEKVTRKEKLERILKLYPGEKSAGMFAQFISLIVGSKGNFQKPFDLIEKSDIECAKDSYEEDLESLLALIGDEYAELFVAAKNAYSAVVLSSIITVAETETNAKLSASMIERFDTHEEDLGELKAFIKLHLPKHYEEIFSNTEKHGYAGYIDGKTKQADFYKYMKMTLENIEGADYFIAKIEKENFLRKQRTFDNGAIPHQLHLEELEAILHQQAKYYPFLKENYDKIKSLVTFRIPYFVGPLANGQSEFAWLTRKADGEIRPWNIEEKVDFGKSAVDFIEKMTNKDTYLPKENVLPKHSLCYQKYLVYNELTKVRYINDQGKTSYFSGQEKEQIFNDLFKQKRKVKKKDLELFLRNMSHVESPTIEGLEDSFNSSYSTYHDLLKVGIKQEILDNPVNTEMLENIVKILTVFEDKRMIKEQLQQFSDVLDGVVLKKLERRHYTGWGRLSAKLLMGIRDKQSHLTILDYLMNDDGLNRNLMQLINDSNLSFKSIIEKEQVTTADKDIQSIVADLAGSPAIKKGILQSLKIVDELVSVMGYPPQTIVVEMARENQTTGKGKNNSRPRYKSLEKAIKEFGSQILKEHPTDNQELRNNRLYLYYLQNGKDMYTGQDLDIHNLSNYDIDHIVPQSFITDNSIDNLVLTSSAGNREKGDDVPPLEIVRKRKVFWEKLYQGNLMSKRKFDYLTKAERGGLTEADKARFIHRQLVETRQITKNVANILHQRFNYEKDDHGNTMKQVRIVTLKSALVSQFRKQFQLYKVRDVNDYHHAHDAYLNGVVANTLLKVYPQLEPEFVYGDYHQFDWFKANKATAKKQFYTNIMLFFAQKDRIIDENGEILWDKKYLDTVKKVMSYRQMNIVKKTEIQKGEFSKATIKPKGNSSKLIPRKTNWDPMKYGGLDSPNMAYAVVIEYAKGKNKLVFEKKIIRVTIMERKAFEKDEKAFLEEQGYRQPKVLAKLPKYTLYECEEGRRRMLASANEAQKGNQQVLPNHLVTLLHHAANCEVSDGKSLDYIESNREMFAELLAHVSEFAKRYTLAEANLNKINQLFEQNKEGDIKAIAQSFVDLMAFNAMGAPASFKFFETTIERKRYNNLKELLNSTIIYQSITGLYESRKRLDD

SEQ ID NO: 4 - protein, 1368 aa, Streptococcus pyogenes
MDKKYSIGLDIGTNSVGWAVITDDYKVPSKKLKGLGNTDRHGIKKNLIGALLFDSGETAEATRLKRTARRRYTRRKNRICYLQEIFSNEMAKVDDSFFHRLEESFLVEEDKKHERHPIFGNIVDEVAYHEKYPTIYHLRKKLADSTDKVDLRLIYLALAHMIKFRGHFLIEGDLNPDNSDVDKLFIQLVQTYNQLFEENPINASRVDAKAILSARLSKSRRLENLIAQLPGEKKNGLFGNLIALSLGLTPNFKSNFDLAEDAKLQLSKDTYDDDLDNLLAQIGDQYADLFLAAKNLSDATLLSDILRVNSEITKAPLSASMIKRYDEHHQDLTLLKALVRQQLPEKYKEIFFDQSKNGYAGYIDGGASQEEFYKFIKPILEKMDGTEELLAKLNREDLLRKQRTFDNGSIPYQIHLGELHAILRRQEDFYPFLKDNREKIEKILTFRIPYYVGPLARGNSRFAWMTRKSEETITPWNFEEVVDKGASAQSFIERMTNFDKNLPNEKVLPKHSLLYEYFTVYNELTKVKYVTEGMRKPAFLSGEQKKAIVDLLFKTNRKVTVKQLKEDYFKKIECFDSVEISGVEDRFNASLGTYHDLLKIIKDKDFLDNEENEDILEDIVLTLTLFEDREMIEERLKTYAHLFDDKVMKQLKRRRYTGWGRLSRKLINGIRDKQSGKTILDFLKSDGFANRNFMQLIHDDSLTFKEDIQKAQVSGQGDSLHEHIANLAGSPAIKKGILQTVKVVDELVKVMGRHKPENIVIEMARENQTTQKGQKNSRERMKRIEEGIKELGSDILKEYPVENTQLQNEKLYLYYLQNGRDMYVDQELDINRLSDYDVDHIVPQSFLKDDSIDNKVLTRSDKNRGKSDNVPSEEVVKKMKNYWRQLLNAKLITQRKFDNLTKAERGGLSELDKVGFIKRQLVETRQITKHVAQILDSRMNTKYDENDKLIREVRVITLKSKLVSDFRKDFQFYKVREINNYHHAHDAYLNAVVGTALIKKYPKLESEFVYGDYKVYDVRKMIAKSEQEIGKATAKYFFYSNIMNFFKTEITLANGEIRKRPLIETNGETGEIVWDKGRDFATVRKVLSMPQVNIVKKTEVQTGGFSKESILPKRNSDKLIARKKDWDPKKYGGFDSPTVAYSVLVVAKVEKGKSKKLKSVKELLGITIMERSSFEKDPIDFLEAKGYKEVRKDLIIKLPKYSLFELENGRKRMLASAGELQKGNELALPSKYVNFLYLASHYEKLKGSPEDNEQKQLFVEQHKHYLDEIIEQISEFSKRVILADANLDKVLSAYNKHRDKPIREQAENIIHLFTLTNLGAPAAFKYFDTTIDRKRYTSTKEVLDATLIHQSITGLYETRIDLSQLGGD

SEQ ID NO: 5 - protein, 1370 aa, Streptococcus agalactiae
MNKPYSIGLDIGTNSVGWSIITDDYKVPAKKMRVLGNTDKEYIKKNLIGALLFDGGNTAADRRLKRTARRRYTRRRNRILYLQEIFAEEMSKVDDSFFHRLEDSFLVEEDKRGSKYPIFATLQEEKDYHEKFSTIYHLRKELADKKEKADLRLIYIALAHIIKFRGHFLIEDDSFDVRNTDISKQYQDFLEIFNTTFENNDLLSQNVDVEAILTDKISKSAKKDRILAQYPNQKSTGIFAEFLKLIVGNQADFKKYFNLEDKTPLQFAKDSYDEDLENLLGQIGDEFADLFSAAKKLYDSVLLSGILTVIDLSTKAPLSASMIQRYDEHREDLKQLKQFVKASLPEKYQEIFADSSKDGYAGYIEGKTNQEAFYKYLSKLLTKQEDSENFLEKIKNEDFLRKQRTFDNGSIPHQVHLTELKAIIRRQSEYYPFLKENQDRIEKILTFRIPYYIGPLAREKSDFAWMTRKTDDSIRPWNFEDLVDKEKSAEAFIHRMTNNDFYLPEEKVLPKHSLIYEKFTVYNELTKVRYKNEQGETYFFDSNIKQEIFDGVFKEHRKVSKKKLLDFLAKEYEEFRIVDVIGLDKENKAFNASLGTYHDLEKILDKDFLDNPDNESILEDIVQTLTLFEDREMIKKRLENYKDLFTESQLKKLYRRHYTGWGRLSAKLINGIRDKESQKTILDYLIDDGRSNRNFMQLINDDGLSFKSIISKAQAGSHSDNLKEVVGELAGSPAIKKGILQSLKIVDELVKVMGYEPEQIVVEMARENQTTNQGRRNSRQRYKLLDDGVKNLASDLNGNILKEYPTDNQALQNERLFLYYLQNGRDMYTGEALDIDNLSQYDIDHIIPQAFIKDDSIDNRVLVSSAKNRGKSDDVPSLEIVKDCKVFWKKLLDAKLMSQRKYDNLTKAERGGLTSDDKARFIQRQLVETRQITKHVARILDERFNNELDSKGRRIRKVKIVTLKSNLVSNFRKEFGFYKIREVNNYHHAHDAYLNAVVAKAILTKYPQLEPEFVYGDYPKYNSYKTRKSATEKLFFYSNIMNFFKTKVTLADGTVVVKDDIEVNNDTGEIVWDKKKHFATVRKVLSYPQNNIVKKTEIQTGGFSKESILAHGNSDKLIPRKTKDIYLDPKKYGGFDSPIVAYSVLVVADIKKGKAQKLKTVTELLGITIMERSRFEKNPSAFLESKGYLNIRADKLIILPKYSLFELENGRRRLLASAGELQKGNELALPTQFMKFLYLASRYNESKGKPEEIEKKQEFVNQHVSYFDDILQLINDFSKRVILADANLEKINKLYQDNKENISVDELANNIINLFTFTSLGAPAAFKFFDKIVDRKRYTSTKEVLNSTLIHQSITGLYETRIDLGKLGED

SEQ ID NO: 6 - protein, 1345 aa, Streptococcus mutans
MKKPYSIGLDIGTNSVGWAVVTDDYKVPAKKMKVLGNTDKSHIEKNLLGALLFDSGNTAEDRRLKRTARRRYTRRRNRILYLQEIFSEEMGKVDDSFFHRLEDSFLVTEDKRGERHPIFGNLEEEVKYHENFPTIYHLRQYLADNPEKVDLRLVYLALAHIIKFRGHFLIEGKFDTRNNDVQRLFQEFLAVYDNTFENSSLQEQNVQVEEILTDKISKSAKKDRVLKLFPNEKSNGRFAEFLKLIVGNQADFKKHFELEEKAPLQFSKDTYEEELEVLLAQIGDNYAELFLSAKKLYDSILLSGILTVTDVGTKAPLSASMIQRYNEHQMDLAQLKQFIRQKLSDKYNEVFSDVSKDGYAGYIDGKTNQEAFYKYLKGLLNKIEGSGYFLDKIEREDFLRKQRTFDNGSIPHQIHLQEMRAIIRRQAEFYPFLADNQDRIEKLLTFRIPYYVGPLARGKSDFAWLSRKSADKITPWNFDEIVDKESSAEAFINRMTNYDLYLPNQKVLPKHSLLYEKFTVYNELTKVKYKTEQGKTAFFDANMKQEIFDGVFKVYRKVTKDKLMDFLEKEFDEFRIVDLTGLDKENKVFNASYGTYHDLCKILDKDFLDNSKNEKILEDIVLTLTLFEDREMIRKRLENYSDLLTKEQVKKLERRHYTGWGRLSAELIHGIRNKESRKTILDYLIDDGNSNRNFMQLINDDALSFKEEIAKAQVIGETDNLNQVVSDIAGSPAIKKGILQSLKIVDELVKIMGHQPENIVVEMARENQFTNQGRRNSQQRLKGLTDSIKEFGSQILKEHPVENSQLQNDRLFLYYLQNGRDMYTGEELDIDYLSQYDIDHIIPQAFIKDNSIDNRVLTSSKENRGKSDDVPSKDVVRKMKSYWSKLLSAKLITQRKFDNLTKAERGGLTDDDKAGFIKRQLVETRQITKHVARILDERFNTETDENNKKIRQVKIVTLKSNLVSNFRKEFELYKVREINDYHHAHDAYLNAVIGKALLGVYPQLEPEFVYGDYPHFHGHKENKATAKKFFYSNIMNFFKKDDVRTDKNGEIIWKKDEHISNIKKVLSYPQVNIVKKVEEQTGGFSKESILPKGNSDKLIPRKTKKFYWDTKKYGGFDSPIVAYSILVIADIEKGKSKKLKTVKALVGVTIMEKMTFERDPVAFLERKGYRNVQEENIIKLPKYSLFKLENGRKRLLASARELQKGNEIVLPNHLGTLLYHAKNIHKVDEPKHLDYVDKHKDEFKELLDVVSNFSKKYTLAEGNLEKIKELYAQNNGEDLKELASSFINLLTFTAIGAPATFKFFDKNIDRKRYTSTTEILNATLIHQSITGLYETRIDLNKLGGD

SEQ ID NO: 7 - protein, 1377 aa, Streptococcus agalactiae
MNKPYSIGLDIGTNSVGWSIITDDYKVPAKKMRVLGNTDKEYIKKNLIGALLFDGGNTAADRRLKRTARRRYTRRRNRILYLQEIFAEEMSKVDDSFFHRLEDSFLVEEDKRGSKYPIFATMQEEKYYHEKFPTIYHLRKELADKKEKADLRLVYLALAHIIKFRGHFLIEDDRFDVRNTDIQKQYQAFLEIFDTTFENNHLLSQNVDVEAILTDKISKSAKKDRILAQYPNQKSTGIFAEFLKLIVGNQADFKKHFNLEDKTPLQFAKDSYDEDLENLLGQIGDEFADLFSVAKKLYDSVLLSGILTVTDLSTKAPLSASMIQRYDEHHEDLKHLKQFVKASLPENYREVFADSSKDGYAGYIEGKTNQEAFYKYLLKLLTKQEGSEYFLEKIKNEDFLRKQRTFDNGSIPHQVHLTELRAIIRRQSEYYPFLKENQDRIEKILTFRIPYYVGPLAREKSDFAWMTRKTDDSIRPWNFEDLVDKEKSAEAFIHRMTNNDLYLPEEKVLPKHSLIYEKFTVYNELTKVRFLAEGFKDFQFLNRKQKETIFNSLFKEKRKVTEKDIISFLNKVDGYEGIAIKGIEKQFNASLSTYHDLKKILGKDFLDNTDNELILEDIVQTLTLFEDREMIKKCLDIYKDFFTESQLKKLYRRHYTGWGRLSAKLINGIRNKENQKTILDYLIDDGSANRNFMQLINDDDLSFKPIIDKARTGSHSDNLKEVVGELAGSPAIKKGILQSLKIVDELVKVMGYEPEQIVVEMARENQTTAKGLSRSRQRLTTLRESLANLKSNILEEKKPKYVKDQVENHHLSDDRLFLYYLQNGRDMYTKKALDIDNLSQYDIDHIIPQAFIKDDSIDNRVLVSSAKNRGKSDDVPSIEIVKARKMFWKNLLDAKLMSQRKYDNLTKAERGGLTSDDKARFIQRQLVETRQITKHVARILDERFNNEVDNGKKICKVKIVTLKSNLVSNFRKEFGFYKIREVNDYHHAHDAYLNAVVAKAILTKYPQLEPEFVYGMYRQKKLSKIVHEDKEEKYSEATRKMFFYSNLMNMFKRVVRLADGSIVVRPVIETGRYMRKTAWDKKKHFATVRKVLSYPQNNIVKKTEIQTGGFSKESILAHGNSDKLIPRKTKDIYLDPKKYGGFDSPIVAYSVLVVADIKKGKAQKLKTVTELLGITIMERSRFEKNPSAFLESKGYLNIRDDKLMILPKYSLFELENGRRRLLASAGELQKGNELALPTQFMKFLYLASRYNESKGKPEEIEKKQEFVNQHVSYFDDILQLINDFSKRVILADANLEKINKLYQDNKENIPVDELANNIINLFTFTSLGAPAAFKFFDKIVDRKRYTSTKEVLNSTLIHQSITGLYETRIDLGKLGED

SEQ ID NO: 8 - protein, 1368 aa, Streptococcus pyogenes; identical to SEQ ID NO: 4

SEQ ID NO: 9 - protein, 131 aa, Helicobacter hepaticus
MRILGFDIGITSIGWAYVESNELKDCGVRIFTKAENPKNGDSLAAPRREARGARRRLARRKARLNAIKRLLCKEFELNLNDYLANDGELPKAYQTSKDTKSPYELYTAFHWIIFAFCSIASSLSNRQMLPI

SEQ ID NO: 10 - protein, 1059 aa, Wolinella succinogenes
MIERILGVDLGISSLGWAIVEYDKDDEAANRIIDCGVRLFTAAETPKKKESPNKARREARGIRRVLNRRRVRMNMIKKLFLRAGLIQDVDLDGEGGMFYSKANRADVWELRHDGLYRLLKGDELARVLIHIAKHRGYKFIGDDEADEESGKVKKAGVVLRQNFEAAGCRTVGEWLWRERGANGKKRNKHGDYEISIHRDLLVEEVEAIFVAQQEMRSTIATDALKAAYREIAFFVRPMQRIEKMVGHCTYFPEERRAPKSAPTAEKFIAISKFFSTVIIDNEGWEQKIIERKTLEELLDFAVSREKVEFRHLRKFLDLSDNEIFKGLHYKGKPKTAKKREATLFDPNEPTELEFDKVEAEKKAWISLRGAAKLREALGNEFYGRFVALGKHADEATKILTYYKDEGQKRRELTKLPLEAEMVERLVKIGFSDFLKLSLKAIRDILPAMESGARYDEAVLMLGVPHKEKSAILPPLNKTDIDILNPTVIRAFAQFRKVANALVRKYGAFDRVHFELAREINTKGEIEDIKESQRKNEKERKEAADWIAETSFQVPLTRKNILKKRLYIQQDGRCAYTGDVIELERLFDEGYCEIDHILPRSRSADDSFANKVLCLARANQQKTDRTPYEWFGHDAARWNAFETRTSAPSNRVRTGKGKIDRLLKKNFDENSEMAFKDRNLNDTRYMARAIKTYCEQYWVFKNSHTKAPVQVRSGKLTSVLRYQWGLESKDRESHTHHAVDAIIIAFSTQGMVQKLSEYYRFKETHREKERPKLAVPLANFRDAVEEATRIENTETVKEGVEVKRLLISRPPRARVTGQAHEQTAKPYPRIKQVKNKKKWRLAPIDEEKFESFKADRVASANQKNFYETSTIPRVDVYHKKGKFHLVPIYLHEMVLNELPNLSLGTNPEAMDENFFKFSIFKDDLISIQTQGTPKKPAKIIMGYFKNMHGANMVLSSINNSPCEGFTCTPVSMDKKHKDKCKLCPEENRIAGRCLQGFLDYWSQEGLRPPRKEFECDQGVKFALDVKKYQIDPLGYYYEVKQEKRLGTIPQMRSAKKLVKK

SEQ ID NO: 11 - protein, 1409 aa, Wolinella succinogenes
MLVSPISVDLGGKNTGFFSFTDSLDNSQSGTVIYDESFVLSQVGRRSKRHSKRNNLRNKLVKRLFLLILQEHHGLSIDVLPDEIRGLFNKRGYTYAGFELDEKKKDALESDTLKEFLSEKLQSIDRDSDVEDFLNQIASNAESFKDYKKGFEAVFASATHSPNKKLELKDELKSEYGENAKELLAGLRVTKEILDEFDKQENQGNLPRAKYFEELGEYIATNEKVKSFFDSNSLKLTDMTKLIGNISNYQLKELRRYFNDKEMEKGDIWIPNKLHKITERFVRSWHPKNDADRQRRAELMKDLKSKEIMELLTTTEPVMTIPPYDDMNNRGAVKCQTLRLNEEYLDKHLPNWRDIAKRLNHGKFNDDLADSTVKGYSEDSTLLHRLLDTSKEIDIYELRGKKPNELLVKTLGQSDANRLYGFAQNYYELIRQKVRAGIWVPVKNKDDSLNLEDNSNMLKRCNHNPPHKKNQIHNLVAGILGVKLDEAKFAEFEKELWSAKVGNKKLSAYCKNIEELRKTHGNTFKIDIEELRKKDPAELSKEEKAKLRLTDDVILNEWSQKIANFFDIDDKHRQRFNNLFSMAQLHTVIDTPRSGFSSTCKRCTAENRFRSETAFYNDETGEFHKKATATCQRLPADTQRPFSGKIERYIDKLGYELAKIKAKELEGMEAKEIKVPIILEQNAFEYEESLRKSKTGSNDRVINSKKDRDGKKLAKAKENAEDRLKDKDKRIKAFSSGICPYCGDTIGDDGEIDHILPRSHTLKIYGTVFNPEGNLIYVHQKCNQAKADSIYKLSDIKAGVSAQWIEEQVANIKGYKTFSVLSAEQQKAFRYALFLQNDNEAYKKVVDWLRTDQSARVNGTQKYLAKKIQEKLTKMLPNKHLSFEFILADATEVSELRRQYARQNPLLAKAEKQAPSSHAIDAVMAFVARYQKVFKDGTPPNADEVAKLAMLDSWNPASNEPLTKGLSTNQKIEKMIKSGDYGQKNMREVFGKSIFGENAIGERYKPIVVQEGGYYIGYPATVKKGYELKNCKVVTSKNDIAKLEKIIKNQDLISLKENQYIKIFSINKQTISELSNRYFNMNYKNLVERDKEIVGLLEFIVENCRYYTKKVDVKFAPKYIHETKYPFYDDWRRFDEAWRYLQENQNKTSSKDRFVIDKSSLNEYYQPDKNEYKLDVDTQPIWDDFCRWYFLDRYKTANDKKSIRIKARKTFSLLAESGVQGKVFRAKRKIPTGYAYQALPMDNNVIAGDYANILLEANSKTLSLVPKSGISIEKQLDKKLDVIKKTDVRGLAIDNNSFFNADFDTHGIRLIVENTSVKVGNFPISAIDKSAKRMIFRALFEKEKGKRKKKTTISFKESGPVQDYLKVFLKKIVKIQLRTDGSISNIVVRKNAADFTLSFRSEHIQKLLK

SEQ ID NO: 12 - protein, 1374 aa, Fusobacterium nucleatum
MKKQKFSDYYLGFDIGTNSVGWCVTDLDYNVLRFNKKDMWGSRLFDEAKTAAERRVQRNSRRRLKRRKWRLNLLEEIFSDEIMKIDSNFFRRLKESSLWLEDKNSKEKFTLFNDDNYKDYDFYKQYPTIFHLRDELIKNPEKKDIRLIYLALHSIFKSRGHFLFEGQNLKEIKNFETLYNNLISFLEDNGINKSIDKDNIEKLEKIICDSGKGLKDKEKEFKGIFNSDKQLVAIFKLSVGSSVSLNDLFDTDEYKKEEVEKEKISFREQIYEDDKPIYYSILGEKIELLDIAKSFYDFMVLNNILSDSNYISEAKVKLYEEHKKDLKNLKYIIRKYNKENYDKLFKDKNENNYPAYIGLNKEKDKKEVVEKSRLKIDDLIKVIKGYLPKPERIEEKDKTIFNEILNKIELKTILPKQRISDNGTLPYQIHEVELEKILENQSKYYDFLNYEENGVSTKDKLLKTFKFRIPYYVGPLNSYHKDKGGNSWIVRKEEGKILPWNFEQKVDIEKSAEEFIKRMTNKCTYLNGEDVIPKDSFLYSEYIILNELNKVQVNDEFLNEENKRKIIDELFKENKKVSEKKFKEYLLVNQIANRTVELKGIKDSFNSNYVSYIKFKDIFGEKLNLDIYKEISEKSILWKCLYGDDKKIFEKKIKNEYGDILNKDEIKKINSFKFNTWGRLSEKLLTGIEFINLETGECYSSVMEALRRTNYNLMELLSSKFTLQESIDNENKEMNEVSYRDLIEESYVSPSLKRAILQTLKIYEEIKKITGRVPKKVFIEMARGGDESMKNKKIPARQEQLKKLYDSCGNDIANFSIDIKEMKNSLSSYDNNSLRQKKLYLYYLQFGKCMYTGREIDLDRLLQNNDTYDIDHIYPRSKVIKDDSFDNLVLVLKNENAEKSNEYPVKKEIQEKMKSFWRFLKEKNFISDEKYKRLTGKDDFELRGFMARQLVNVRQTTKEVGKILQQIEPEIKIVYSKAEIASSFREMFDFIKVRELNDTHHAKDAYLNIVAGNVYNTKFTEKPYRYLQEIKENYDVKKIYNYDIKNAWDKENSLEIVKKNMEKNTVNITRFIKEEKGELFNLNPIKKGETSNEIISIKPKLYDGKDNKLNEKYGYYTSLKAAYFIYVEHEKKNKKVKTFERITRIDSTLIKNEKNLIKYLVSQKKLLNPKIIKKIYKEQTLIIDSYPYTFTGVDSNKKVELKNKKQLYLEKKYEQILKNALKFVEDNQGETEENYKFIYLKKRNNNEKNETIDAVKERYNIEFNEMYDKFLEKLSSKDYKNYINNKLYTNFLNSKEKFKKLKLWEKSLILREFLKIFNKNTYGKYEIKDSQTKEKLFSFPEDTGRIRLGQSSLGNNKELLEESVTGLFVKKIKL

SEQ ID NO: 13 - protein, 1084 aa, Corynebacterium diphtheriae
MKYHVGIDVGTFSVGLAAIEVDDAGMPIKTLSLVSHIHDSGLDPDEIKSAVTRLASSGIARRTRRLYRRKRRRLQQLDKFIQRQGWPVIELEDYSDPLYPWKVRAELAASYIADEKERGEKLSVALRHIARHRGWRNPYAKVSSLYLPDGPSDAFKAIREEIKRASGQPVPETATVGQMVTLCELGTLKLRGEGGVLSARLQQSDYAREIQEICRMQEIGQELYRKIIDVVFAAESPKGSASSRVGKDPLQPGKNRALKASDAFQRYRIAALIGNLRVRVDGEKRILSVEEKNLVFDHLVNLTPKKEPEWVTIAEILGIDRGQLIGTATMTDDGERAGARPPTHDTNRSIVNSRIAPLVDWWKTASALEQHAMVKALSNAEVDDFDSPEGAKVQAFFADLDDDVHAKLDSLHLPVGRAAYSEDTLVRLTRRMLSDGVDLYTARLQEFGIEPSWTPPTPRIGEPVGNPAVDRVLKTVSRWLESATKTWGAPERVIIEHVREGFVTEKRAREMDGDMRRRAARNAKLFQEMQEKLNVQGKPSRADLWRYQSVQRQNCQCAYCGSPITFSNSEMDHIVPRAGQGSTNTRENLVAVCHRCNQSKGNTPFAIWAKNTSIEGVSVKEAVERTRHWVTDTGMRSTDFKKFTKAVVERFQRATMDEEIDARSMESVAWMANELRSRVAQHFASHGTTVRVYRGSLTAEARRASGISGKLKFFDGVGKSRLDRRHHAIDAAVIAFTSDYVAETLAVRSNLKQSQAHRQEAPQWREFTGKDAEHRAAWRVWCQKMEKLSALLTEDLRDDRVVVMSNVRLRLGNGSAHKETIGKLSKVKLSSQLSVSDIDKASSEALWCALTREPGFDPKEGLPANPERHIRVNGTHVYAGDNIGLFPVSAGSIALRGGYAELGSSFHHARVYKITSGKKPAFAMLRVYTIDLLPYRNQDLFSVELKPQTMSMRQAEKKLRDALATGNAEYLGWLVVDDELVVDTSKIATDQVKAVEAELGTIRRWRVDGFFSPSKLRLRPLQMSKEGIKKESAPELSKIIDRPGWLPAVNKLFSDGNVTVVRRDSLGRVRLESTAHLPVTWKVQ

SEQ ID NO: 14 - protein, 1395 aa, Treponema denticola
MKKEIKDYFLGLDVGTGSVGWAVTDTDYKLLKANRKDLWGMRCFETAETAEVRRLHRGARRRIERRKKRIKLLQELFSQEIAKTDEGFFQRMKESPFYAEDKTILQENTLFNDKDFADKTYHKAYPTINHLIKAWIENKVKPDPRLLYLACHNIIKKRGHFLFEGDFDSENQFDTSIQALFEYLREDMEVDIDADSQKVKEILKDSSLKNSEKQSRLNKILGLKPSDKQKKAITNLISGNKINFADLYDNPDLKDAEKNSISFSKDDFDALSDDLASILGDSFELLLKAKAVYNCSVLSKVIGDEQYLSFAKVKIYEKHKTDLTKLKNVIKKHFPKDYKKVFGYNKNEKNNNNYSGYVGVCKTKSKKLIINNSVNQEDFYKFLKTILSAKSEIKEVNDILTEIETGTFLPKQISKSNAEIPYQLRKMELEKILSNAEKHFSFLKQKDEKGLSHSEKIIMLLTFKIPYYIGPINDNHKKFFPDRCWVVKKEKSPSGKTTPWNFFDHIDKEKTAEAFITSRTNFCTYLVGESVLPKSSLLYSEYTVLNEINNLQIIIDGKNICDIKLKQKIYEDLFKKYKKITQKQISTFIKHEGICNKTDEVIILGIDKECTSSLKSYIELKNIFGKQVDEISTKNMLEEIIRWATIYDEGEGKTILKTKIKAEYGKYCSDEQIKKILNLKFSGWGRLSRKFLETVTSEMPGFSEPVNIITAMRETQNNLMELLSSEFTFTENIKKINSGFEDAEKQFSYDGLVKPLFLSPSVKKMLWQTLKLVKEISHITQAPPKKIFIEMAKGAELEPARTKTRLKILQDLYNNCKNDADAFSSEIKDLSGKIENEDNLRLRSDKLYLYYTQLGKCMYCGKPIEIGHVFDTSNYDIDHIYPQSKIKDDSISNRVLVCSSCNKNKEDKYPLKSEIQSKQRGFWNFLQRNNFISLEKLNRLTRATPISDDETAKFIARQLVETRQATKVAAKVLEKMFPETKIVYSKAETVSMFRNKFDIVKCREINDFHHAHDAYLNIVVGNVYNTKFTNNPWNFIKEKRDNPKIADTYNYYKVFDYDVKRNNITAWEKGKTIITVKDMLKRNTPIYTRQAACKKGELFNQTIMKKGLGQHPLKKEGPFSNISKYGGYNKVSAAYYTLIEYEEKGNKIRSLETIPLYLVKDIQKDQDVLKSYLTDLLGKKEFKILVPKIKINSLLKINGFPCHITGKTNDSFLLRPAVQFCCSNNEVLYFKKIIRFSEIRSQREKIGKTISPYEDLSFRSYIKENLWKKTKNDEIGEKEFYDLLQKKNLEIYDMLLTKHKDTIYKKRPNSATIDILVKGKEKFKSLIIENQFEVILEILKLFSATRNVSDLQHIGGSKYSGVAKIGNKISSLDNCILIYQSITGIFEKRIDLLKV

SEQ ID NO: 15 - protein, 1334 aa, Listeria monocytogenes
MKNPYTIGLDIGTNSVGWAVLTNQYDLVKRKMKVAGNSDKKQIKKNFWGVRLFDDGQTAVDRRMNRTARRRIERRRNRISYLQEIFAVEMANIDANFFCRLNDSFYVDSEKRNSRHPFFATIEEEVAYHDNYRTIYHLREKLVNSSEKADLRLVYLALAHIIKYRGNFLIEGALDTKNTSVDEVYKQFIETYNQVFMSNIEEGALAKVEENIEVANILAGKFTRREKFERILQLYPGEKSTGMFAQFISLIVGSKGNFQKVFDLIEKTDIECAKDSYEEDLETLLAIIGDEYAELFVAAKNTYNAVVLSSIITVTDTETNAKLSASMIERFDAHEKDLVELKAFIKLNLPKQYEEIFSNAAIDGYAGYIDGKTKQVDFYKYLKTILENIEGSDYFIAKIEEENFLRKQRTFDNGAIPHQLHLEELEAIIHQQAKYYPFLKEDYDKIKSLVTFRIPYFVGPLANGQSEFAWLTRKADGEIRPWNIEEKVDFGKSAVDFIEKMTNKDTYLPKENVLPKHSLCYQKYMVYNELTKIRYIDDQGKTNYFSGREKQQVFNDLFKQKRKVKKKDLELFLRNINHIESPTIEGLEDSFNASYATYHDLLKVGMKQEILDNPLNTEMLEDIVKILTVFEDKPMIKEQLQQFSDVLDGGVLKKLERRHYTGWGRLSAKLLVGIREKQSHLTILDYLMNDDGLNRNLMQLINDSNLSFKSIIEKEQVSTTDKDLQSIVAELAGSPAIKKGILQSLKIVDELVSIMGYPPQTIVVEMARENQTTGKGKNNSKPRYKSLEKAIKEFGSQILKEHPTDNQELKNNRLYLYYLQNGKDMYTGQELDIHNLSNYDIDHIVPQSFITDNSIDNLVLTSSAGNREKGGDVPPLEIVRKRKVFWEKLYQGNLMSKRKFDYLTKAERGGLTEADKARFIHRQLVETRQITKNVANILYQRFNKETDNHGNTMEQVRIVTLKSALVSQFRKQFQLYKVREVNGYHHAHDAYLNGVVANTLLKVYPQLEPEFVYGEYHQFDWFKANKATAKKQFYTNIMLFFAQKERIIDENGEILWDKKYLETIKKVLDYRQMNIVKKTEIQKGEFSKATIKPKGNSSKLIPRKENWDPMKYGGLDSPNMAYAVIIEHAKGKKKIVIEKKLIQINIMERKMFEKDEEAFLEEKGYRHPKVLTKLPKYTLYECEKGRRRMLASANEAQKGNQLVLSNHLVSLLYHAKNCEASDGKSLKYIEAHRETFSELLAQVSEFATRYTLADANLSKINNLFEQNKEGDIKAIAQSFVDLMAFNAMGAPASFKFFEATIDRKRYTNLKELLSSTIIYQSITGLYESRKRLDD

SEQ ID NO: 16 - protein, 1236 aa, Mycoplasma mobile
MYFYKNKENKLNKKVVLGLDLGIASVGWCLTDISQKEDNKFPIILHGVRLFETVDDSDDKLLNETRRKKRGQRRRNRRLFTRKRDFIKYLIDNNIIELEFDKNPKILVRNFIEKYINPFSKNLELKYKSVTNLPIGFHNLRKAAINEKYKLDKSELIVLLYFYLSLRGAFFDNPEDTKSKEMNKNEIEIFDKNESIKNAEFPIDKIIEFYKISGKIRSTINLKFGHQDYLKEIKQVFEKQNIDFMNYEKFAMEEKSFFSRIRNYSEGPGNEKSFSKYGLYANENGNPELIINEKGQKIYTKIFKTLWESKIGKCSYDKKLYRAPKNSFSAKVFDITNKLTDWKHKNEYISERLKRKILLSRFLNKDSKSAVEKILKEENIKFENLSEIAYNKDDNKINLPIINAYHSLTTIFKKHLINFENYLISNENDLSKLMSFYKQQSEKLFVPNEKGSYEINQNNNVLHIFDAISNILNKFSTIQDRIRILEGYFEFSNLKKDVKSSEIYSEIAKLREFSGTSSLSFGAYYKFIPNLISEGSKNYSTISYEEKALQNQKNNFSHSNLFEKTWVEDLIASPTVKRSLRQTMNLLKEIFKYSEKNNLEIEKIVVEVTRSSNNKHERKKIEGINKYRKEKYEELKKVYDLPNENTTLLKKLWLLRQQQGYDAYSLRKIEANDVINKPWNYDIDHIVPRSISFDDSFSNLVIVNKLDNAKKSNDLSAKQFIEKIYGIEKLKEAKENWGNWYLRNANGKAFNDKGKFIKLYTIDNLDEFDNSDFINRNLSDTSYITNALVNHLTFSNSKYKYSVVSVNGKQTSNLRNQIAFVGIKNNKETEREWKRPEGFKSINSNDFLIREEGKNDVKDDVLIKDRSFNGHHAEDAYFITIISQYFRSFKRIERLNVNYRKETRELDDLEKNNIKFKEKASFDNFLLINALDELNEKLNQMRFSRMVITKKNTQLFNETLYSGKYDKGKNTIKKVEKLNLLDNRTDKIKKIEEFFDEDKLKENELTKLHIFNHDKNLYETLKIIWNEVKIEIKNKNLNEKNYFKYFVNKKLQEGKISFNEWVPILDNDFKIIRKIRYIKFSSEEKETDEIIFSQSNFLKIDQRQNFSFHNTLYWVQIWVYKNQKDQYCFISIDARNSKFEKDEIKINYEKLKTQKEKLQIINEEPILKINKGDLFENEEKELFYIVGRDEKPQKLEIKYILGKKIKDQKQIQKPVKKYFPNWKKVNLTYMGEIFKK

SEQ ID NO: 17 - protein, 1372 aa, Legionella pneumophila
MESSQILSPIGIDLGGKFTGVCLSHLEAFAELPNHANTKYSVILIDHNNFQLSQAQRRATRHRVRNKKRNQFVKRVALQLFQHILSRDLNAKEETALCHYLNNRGYTYVDTDLDEYIKDETTINLLKELLPSESEHNFIDWFLQKMQSSEFRKILVSKVEEKKDDKELKNAVKNIKNFITGFEKNSVEGHRHRKVYFENIKSDITKDNQLDSIKKKIPSVCLSNLLGHLSNLQWKNLHRYLAKNPKQFDEQTFGNEFLRMLKNFRHLKGSQESLAVRNLIQQLEQSQDYISILEKTPPEITIPPYEARTNTGMEKDQSLLLNPEKLNNLYPNWRNLIPGIIDAHPFLEKDLEHTKLRDRKRIISPSKQDEKRDSYILQRYLDLNKKIDKFKIKKQLSFLGQGKQLPANLIETQKEMETHFNSSLVSVLIQIASAYNKEREDAAQGIWFDNAFSLCELSNINPPRKQKILPLLVGAILSEDFINNKDKWAKFKIFWNTHKIGRTSLKSKCKEIEEARKNSGNAFKIDYEEALNHPEHSNNKALIKIIQTIPDIIQAIQSHLGHNDSQALIYHNPFSLSQLYTILETKRDGFHKNCVAVTCENYWRSQKTEIDPEISYASRLPADSVRPFDGVLARMMQRLAYEIAMAKWEQIKHIPDNSSLLIPIYLEQNRFEFEESFKKIKGSSSDKTLEQAIEKQNIQWEEKFQRIINASMNICPYKGASIGGQGEIDHIYPRSLSKKHFGVIFNSEVNLIYCSSQGNREKKEEHYLLEHLSPLYLKHQFGTDNVSDIKNFISQNVANIKKYISFHLLTPEQQKAARHALFLDYDDEAFKTITKFLMSQQKARVNGTQKFLGKQIMEFLSTLADSKQLQLEFSIKQITAEEVHDHRELLSKQEPKLVKSRQQSFPSHAIDATLTMSIGLKEFPQFSQELDNSWFINHLMPDEVHLNPVRSKEKYNKPNISSTPLFKDSLYAERFIPVWVKGETFAIGFSEKDLFEIKPSNKEKLFTLLKTYSTKNPGESLQELQAKSKAKWLYFPINKTLALEFLHHYFHKEIVTPDDTTVCHFINSLRYYTKKESITVKILKEPMPVLSVKFESSKKNVLGSFKHTIALPATKDWERLFNHPNFLALKANPAPNPKEFNEFIRKYFLSDNNPNSDIPNNGHNIKPQKHKAVRKVFSLPVIPGNAGTMMRIRRKDNKGQPLYQLQTIDDTPSMGIQINEDRLVKQEVLMDAYKTRNLSTIDGINNSEGQAYATFDNWLTLPVSTFKPEIIKLEMKPHSKTRRYIRITQSLADFIKTIDEALMIKPSDSIDDPLNMPNEIVCKNKLFGNELKPRDGKMKIVSTGKIVTYEFESDSTPQWIQTLYVTQLKKQP

SEQ ID NO: 18 - protein, 1122 aa, Streptococcus thermophilus
MSDLVLGLDIGIGSVGVGILNKVTGEIIHKNSRIFPAAQAENNLVRRTNRQGRRLTRRKKHRIVRLNRLFEESGLITDFTKISINLNPYQLRVKGLTDELSNEELFIALKNMVKHRGISYLDDASDDGNSSVGDYAQIVKENSKQLETKTPGQIQLERYQTYGQLRGDFTVEKDGKKHRLINVFPTSAYRSEALRILQTQQEFNSQITDEFINRYLEILTGKRKYYHGPGNEKSRTDYGRYRTNGETLDNIFGILIGKCTFYPDEFRAAKASYTAQEFNLLNDLNNLTVPTETKKLSKEQKNQIINYVKNEKVMGPAKLFKYIAKLLSCDVADIKGHRIDKSGKAEIHTFEAYRKMKTLETLDIEQMDRETLDKLAYVLTLNTEREGIQEALEHEFADGSFSQKQVDELVQFRKANSSIFGKGWHNFSVKLMMELIPELYETSEEQMTILTRLGKQKTTSSSNKTKYIDEKLLTEEIYNPVVAKSVRQAIKIVNAAIKEYGDFDNIVIEMARETNEDDEKKAIQKIQKANKDEKDAAMLKAANQYNGKAELPHSVFHGHKQLATKIRLWHQQGERCLYTGKTISIHDLINNPNQFEVDHILPLSITFDDSLANKVLVYATANQEKGQRTPYQALDSMDDAWSFRELKAFVRESKTLSNKKKEYLLTEEDISKFDVRKKFIERNLVDTRYASRVVLNALQEHFRAHKIDTKVSVVRGQFTSQLRRHWGIEKTRDTYHHHAVDALIIAASSQLNLWKKQKNTLVSYSEEQLLDIETGELISDDEYKESVFKAPYQHFVDTLKSKEFEDSILFSYQVDSKFNRKISDATIYATRQAKVGKDKKDETYVLGKIKDIYTQDGYDAFMKIYKKDKSKFLMYRHDPQTFEKVIEPILENYPNKEMNEKGKEVPCNPFLKYKEEHGYIRKYSKKGNGPEIKSLKYYDSKLLGNPIDITPENSKNKVVLQSLKPWRTDVYFNKNTGKYEILGLKYADLQFEKKTGTYKISQEKYNGIMKEEGVDSDSEFKFTLYKNDLLLVKDTETKEQQLFRFLSRTMPNVKYYVELKPYSKDKFEKNESLIEILGSADKSGRCIKGLGKSNISIYKVRTDVLGNQHIIKNEGDKPKLDF

SEQ ID NO: 19 - protein, 1128 aa, Streptococcus thermophilus
MSDLVLGLDIGIGSVGVGILNKVTGEIIHKNSRIFPAAQAENNLVRRTNRQGRRLTRRKKHRIVRLNRLFEESGLITDFTKISINLNPYQLRVKGLTDELSNEELFIALKNMVKHRGISYLDDASDDGNSSVGDYAQIVKENSKQLETKTPGQIQLERYQTYGQLRGDFTVEKDGKKHRLINVFPTSAYRSEALRILQTQQEFNPQITDEFINRYLEILTGKRKYYHGPGNEKSRTDYGRYRTSGETLDNIFGILIGKCTFYPEEFRAAKASYTAQEFNLLNDLNNLTVPTETKKLSKEQKNQIINYVKNEKAMGPAKLFKYIAKLLSCDVADIKGYRIDKSGKAEIHTFEAYRKMKTLETLDIEQMDRETLDKLAYVLTLNTEREGIQEALEHEFADGSFSQKQVDELVQFRKANSSIFGKGWHNFSVKLMMELIPELYETSEEQMTILTRLGKQKRLRLQIKQNISNKTKYIDEKLLTEEIYNPVVAKSVRQAIKIVNAAIKEYGDFDNIVIEMARETNEDDEKKAIQKIQKANKDEKDAAMLKAANQYNGKAELPHSVFHGHKQLATKIRLWHQQGERCLYTGKTISIHDLINNPNQFEVDHILPLSITFDDSLANKVLVYATANQEKGQRTPYQALDSMDDAWSFRELKAFVRESKTLSNKKKEYLLTEEDISKFDVRKKFIERNLVDTRYASRVVLNALQEHFRAHKIDTKVSVVRGQFTSQLRRHWGIEKTRDTYHHHAVDALIIAASSQLNLWKKQKNTLVSYSEEQLLDIETGELISDDEYKESVFKAPYQHFVDTLKSKEFEDSILFSYQVDSKFNRKISDATIYATRQAKVGKDKKDETYVLGKIKDIYTQDGYDAFMKIYKKDKSKFLMYRHDPQTFEKVIEPILENYPNKQMNEKGKEVPCNPFLKYKEEHGYIRKYSKKGNGPEIKSLKYYDSKLLGNPIDITPENSKNKVVLQSLKPWRTDVYFNKATGKYEILGLKYADLQFEKGTGTYKISQEKYNDIKKKEGVDSDSEFKFTLYKNDLLLVKDTETKEQQLFRFLSRTLPKQKHYVELKPYDKQKFEGGEALIKVLGNVANGGQCIKGLAKSNISIYKVRTDVLGNQHIIKNEGDKPKLDF

SEQ ID NO: 20 - protein, 1123 aa, Francisella tularensis
MNVKILPIAIDLDVKNTGVFSAFYQKGTSLEKLDNKNGKVYELSKDSYTLLMNNRTARRHKRRGIDRKQLVKRLFKLVWTEQLNLEWDKDTQQAISFLFNRRGFSFITDGYSTEYLNIVPEQVKAILMDIFDDYNGEDDLDSYLKLATEQESKISEIYNKLMQKILEFKLRKLCTDIKDDKVSTKTLKEITSYEFELLADYLANYSESLKTQKFSYTDKQGNLKELSYYHHDKYNIQEFLKRHATINDEILGTLLTDDFDIWNFNFEKFDFDKNEEKLQNQEDKDHTQAHLHHFVFVVNKIKSEMASGGRHRSQYFQEITNVLDENNHQEGYLKNFCENLHNKKYSNLSVKNLVNLVGNLSNLELKPLRKYFNDKIHAKADHWDEQKFTETYCHWILGEWRVGVKDQDKKDGAKYSYKDLCNELKQKVTKAGLIDFLLELDPCRTIPPYLDNNNRKPPKCQSLILNPKFLDNQYPNWQQYLQELKKLQSIQDYLDSFETDLKDLKSSKDQPYFVEYKSSNQQMASGQRDYKDLDARILQFIFDRVKASDELLLNEIYFQAKKLKQKASSELEKLESSKKLDEVIANSQLSQILKSQHTNGIFEQGTFLHLVCKYYKQRQRARDSRLYIMPEYRYDKKLDKYNNTGRFDDNNQLLTYCNHKPRQKRYQLLNDLAGVLQVSRNQLLSSVEEWFQQAQRVGEISKSQDEQIFEWLKSFKIASYCKAAVEMQKQYRGTLKNAIQTAIFRQSENINKNKNTGNQQQALSENSKDVKSLTADEKKLLKLIENIAKASQKIGESLGLNDKQIKKFNSIYSFAQIQQIAFAKRKGNANTCAVCSADNAHRMQQIKITELVEDNKDNIILSAKAQRLPAIPTRIVDGAVKKMATILAKNIVDDNWQNIKQVLSAKHQLHIPIITESNAFEFEPALADVKGKSLKDRRKKALERISPENIFKDKNNRIKEFAKGISAYSGANLTDGDFDGAKEELDHIIPRSHKKYGTLNDEANLICVTRDDNKNIFAIDTSKWFEIETPSDLRDIGVATIQYKIDNNSRPKVRVKLDYVIDDDSKINYFMNHSLLKSRYPDKVLEILKQSTIIEFESSGFNKTIKEMLGMTLAGIYNETSNN

SEQ ID NO: 21 - protein, 1436 aa, Bacteroides fragilis
MKRILGLDLGTNSIGWALVNEAENKDERSSIVKLGVRVNPLTVDELTNFEKGKSITTNADRTLKRGMRRNLQRYKLRRETLTEVLKEHKLITEDTILSENGNRTTFETYRLRAKAVTEEISLEEFARVLLMINKKRGYKSSRKAKGVEEGTLIDGMDIARELYNNNLTPGELCLQLLDAGKKFLPDFYRSDLQNELDRIWEKQKEYYPEILTDVLKEELRGKKRDAVWAICAKYFVWKENYTEWNKEKGKTEQQEREHKLEGIYSKRKRDEAKRENLQWRVNGLKEKLSLEQLVIVFQEMNTQINNSSGYLGAISDRSKELYFNKQTVGQYQMEMLDKNPNASLRNMVFYRQDYLDEFNMLWEKQAVYHKELTEELKKEIRDIIIFYQRRLKSQKGLIGFCEFESRQIEVDIDGKKKIKTVGNRVISRSSPLFQEFKIWQILNNIEVTVVGKKRKRRKLKENYSALFEELNDAEQLELNGSRRLCQEEKELLAQELFIRDKMTKSEVLKLLFDNPQELDLNFKTIDGNKTGYALFQAYSKMIEMSGHEPVDFKKPVEKVVEYIKAVFDLLNWNTDILGFNSNEELDNQPYYKLWHLLYSFEGDNTPTGNGRLIQKMTELYGFEKEYATILANVSFQDDYGSLSAKAIHKILPHLKEGNRYDVACVYAGYRHSESSLTREEIANKVLKDRLMLLPKNSLHNPVVEKILNQMVNVINVIIDIYGKPDEIRVELARELKKNAKEREELTKSIAQTTKAHEEYKTLLQTEFGLTNVSRTDILRYKLYKELESCGYKTLYSNTYISREKLFSKEFDIEHIIPQARLFDDSFSNKTLEARSVNIEKGNKTAYDFVKEKFGESGADNSLEHYLNNIEDLFKSGKISKTKYNKLKMAEQDIPDGFIERDLRNTQYIAKKALSMLNEISHRVVATSGSVTDKLREDWQLIDVMKELNWEKYKALGLVEYFEDRDGRQIGRIKDWTKRNDHRHHAMDALTVAFTKDVFIQYFNNKNASLDPNANEHAIKNKYFQNGRAIAPMPLREFRAEAKKHLENTLISIKAKNKVITGNINKTRKKGGVNKNMQQTPRGQLHLETIYGSGKQYLTKEEKVNASFDMRKIGTVSKSAYRDALLKRLYENDNDPKKAFAGKNSLDKQPIWLDKEQMRKVPEKVKIVTLEAIYTIRKEISPDLKVDKVIDVGVRKILIDRLNEYGNDAKKAFSNLDKNPIWLNKEKGISIKRVTISGISNAQSLHVKKDKDGKPILDENGRNIPVDFVNTGNNHHVAVYYRPVIDKRGQLVVDEAGNPKYELEEVVVSFFEAVTRANLGLPIIDKDYKTTEGWQFLFSMKQNEYFVFPNEKTGFNPKEIDLLDVENYGLISPNLFRVQKFSLKNYVFRHHLETTIKDTSSILRGITWIDFRSSKGLDTIVKVRVNHIGQIVSVGEY

SEQ ID NO: 22 - protein, 1314 aa, Mycoplasma synoviae
MLRLYCANNLVLNNVQNLWKYLLLLIFDKKIIFLFKIKVILIRRYMENNNKEKIVIGFDLGVASVGWSIVNAETKEVIDLGVRLFSEPEKADYRRAKRTTRRLLRRKKFKREKFHKLILKNAEIFGLQSRNEILNVYKDQSSKYRNILKLKINALKEEIKPSELVWILRDYLQNRGYFYKNEKLTDEFVSNSFPSKKLHEHYEKYGFFRGSVKLDNKLDNKKDKAKEKDEEEESDAKKESEELIFSNKQWINEIVKVFENQSYLTESFKEEYLKLFNYVRPFNKGPGSKNSRTAYGVFSTDIDPETNKFKDYSNIWDKTIGKCSLFEEEIRAPKNLPSALIFNLQNEICTIKNEFTEFKNWWLNAEQKSEILKFVFTELFNWKDKKYSDKKFNKNLQDKIKKYLLNFALENFNLNEEILKNRDLENDTVLGLKGVKYYEKSNATADAALEFSSLKPLYVFIKFLKEKKLDLNYLLGLENTEILYFLDSIYLAISYSSDLKERNEWFKKLLKELYPKIKNNNLEIIENVEDIFEITDQEKFESFSKTHSLSREAFNHIIPLLLSNNEGKNYESLKHSNEELKKRTEKAELKAQQNQKYLKDNFLKEALVPLSVKTSVLQAIKIFNQIIKNFGKKYEISQVVIEMARELTKPNLEKLLNNATNSNIKILKEKLDQTEKFDDFTKKKFIDKIENSVVFRNKLFLWFEQDRKDPYTQLDIKINEIEDETEIDHVIPYSKSADDSWFNKLLVKKSTNQLKKNKTVWEYYQNESDPEAKWNKFVAWAKRIYLVQKSDKESKDNSEKNSIFKNKKPNLKFKNITKKLFDPYKDLGFLARNLNDTRYATKVFRDQLNNYSKHHSKDDENKLFKVVCMNGSITSFLRKSMWRKNEEQVYRFNFWKKDRDQFFHHAVDASIIAIFSLLTKTLYNKLRVYESYDVQRREDGVYLINKETGEVKKADKDYWKDQHNFLKIRENAIEIKNVLNNVDFQNQVRYSRKANTKLNTQLFNETLYGVKEFENNFYKLEKVNLFSRKDLRKFILEDLNEESEKNKKNENGSRKRILTEKYIVDEILQILENEEFKDSKSDINALNKYMDSLPSKFSEFFSQDFINKCKKENSLILTFDAIKHNDPKKVIKIKNLKFFREDATLKNKQAVHKDSKNQIKSFYESYKCVGFIWLKNKNDLEESIFVPINSRVIHFGDKDKDIFDFDSYNKEKLLNEINLKRPENKKFNSINEIEFVKFVKPGALLLNFENQQIYYISTLESSSLRAKIKLLNKMDKGKAVSMKKITNPDEYKIIEHVNPLGINLNWTKKLENNN

SEQ ID NO: 23 - protein, 1368 aa, Streptococcus pyogenes
MDKKYSIGLDIGTNSVGWAVITDDYKVPSKKFKVLGNTDRHSIKKNLIGALLFDSGETAEATRLKRTARRRYTRRKNRICYLQEIFSNEMAKVDDSFFHRLEESFLVEEDKKHERHPIFGNIVDEVAYHEKYPTIYHLRKKLVDSTDKADLRLIYLALAHMIKFRGHFLIEGDLNPDNSDVDKLFIQLVQTYNQLFEENPINASGVDAKAILSARLSKSRRLENLIAQLPGEKKNGLFGNLIALSLGLTPNFKSNFDLAEDAKLQLSKDTYDDDLDNLLAQIGDQYADLFLAAKNLSDAILLSDILRLNSEITKAPLSASMIKRYDEHHQDLTLLKALVRQQLPEKYKEIFFDQSKNGYAGYIDGGASQEEFYKFIKPILEKMDGTEELLAKLNREDLLRKQRTFDNGSIPHQIHLGELHAILRRQEDFYPFLKDNREKIEKILTFRIPYYVGPLARGNSRFAWMTRKSEETITPWNFEEVVDKGASAQSFIERMTNFDKNLPNEKVLPKHSLLYEYFTVYNELTKVKYVTEGMRKPAFLSGEQKKAIVDLLFKTNRKVTVKQLKEDYFKKIECFDSVEISGVEDRFNASLGTYHDLLKIIKDKDFLDNEENEDILEDIVLTLTLFEDREMIEERLKTYAHLFDDKVMKQLKRRRYTGWGRLSRKLINGIRDKQSGKTILDFLKSDGFANRNFMQLIHDDSLTFKEDIQKAQVSGQGDSLHEHIANLAGSPAIKKGILQTVKVVDELVKVMGRHKPENIVIEMARENQTTQKGQKNSRERMKRIEEGIKELGSQILKEHPVENTQLQNEKLYLYYLQNGRDMYVDQELDINRLSDYDVDHIVPQSFIKDDSIDNKVLTRSDKNRGKSNNVPSEEVVKKMKNYWRQLLNAKLITQRKFDNLTKAERGGLSELDKAGFIKRQLVETRQITKHVAQILDSRMNTKYDENDKLIREVKVITLKSKLVSDFRKDFQFYKVREINNYHHAHDAYLNAVVGTALIKKYPKLESEFVYGDYKVYDVRKMIAKSEQEIGKATAKYFFYSNIMNFFKTEITLANGEIRKRPLIETNGETGEIVWDKGRDFATVRKVLSMPQVNIVKKTEVQTGGFSKESILPKRNSDKLIARKKDWDPKKYGGFDSPTVAYSVLVVAKVEKGKSKKLKSVKELLGITIMERSSFEKNPIDFLEAKGYKEVRKDLIVKLPKYSLFELENGRKRMLASAGELQKGNELALPSKYVNFLYLASHYEKLKGSPEDNEQKQLFVEQHKHYLDEIIEQISEFSKRVILADANLDKVLSAYNKHRDKPIREQAENIIHLFTLTNLGAPAAFKYFDTTIDRKRYTSTKEVLDATFIHQSITGLYETRIDLSQLGGD

SEQ ID NO: 24 - protein, 1368 aa, Streptococcus pyogenes
MDKKYSIGLDIGTNSVGWAVITDDYKVPSKKFKVLGNTDRHSIKKNLIGALLFDSGETAEATRLKRTARRRYTRRKNRICYLQEIFSNEMAKVDDSFFHRLEESFLVEEDKKHERHPIFGNIVDEVAYHEKYPTIYHLRKKLVDSTDKADLRLIYLALAHMIKFRGHFLIEGDLNPDNSDVDKLFIQLVQTYNQLFEENPINASGVDAKAILSARLSKSRRLENLIAQLPGEKKNGLFGNLIALSLGLTPNFKSNFDLAEDAKLQLSKDTYDDDLDNLLAQIGDQYADLFLAAKNLSDAILLSDILRVNTEITKAPLSASMIKRYDEHHQDLTLLKALVRQQLPEKYKEIFFDQSKNGYAGYIDGGASQEEFYKFIKPILEKMDGTEELLVKLNREDLLRKQRTFDNGSIPHQIHLGELHAILRRQEDFYPFLKDNREKIEKILTFRIPYYVGPLARGNSRFAWMTRKSEETITPWNFEEVVDKGASAQSFIERMTNFDKNLPNEKVLPKHSLLYEYFTVYNELTKVKYVTEGMRKPAFLSGEQKKAIVDLLFKTNRKVTVKQLKEDYFKKIECFDSVEISGVEDRFNASLGTYHDLLKIIKDKDFLDNEENEDILEDIVLTLTLFEDREMIEERLKTYAHLFDDKVMKQLKRRRYTGWGRLSRKLINGIRDKQSGKTILDFLKSDGFANRNFMQLIHDDSLTFKEDIQKAQVSGQGDSLHEHIANLAGSPAIKKGILQTVKVVDELVKVMGRHKPENIVIEMARENQTTQKGQKNSRERMKRIEEGIKELGSQILKEHPVENTQLQNEKLYLYYLQNGRDMYVDQELDINRLSDYDVDHIVPQSFLKDDSIDNKVLTRSDKNRGKSDNVPSEEVVKKMKNYWRQLLNAKLITQRKFDNLTKAERGGLSELDKAGFIKRQLVETRQITKHVAQILDSRMNTKYDENDKLIREVKVITLKSKLVSDFRKDFQFYKVREINNYHHAHDAYLNAVVGTALIKKYPKLESEFVYGDYKVYDVRKMIAKSEQEIGKATAKYFFYSNIMNFFKTEITLANGEIRKRPLIETNGETGEIVWDKGRDFATVRKVLSMPQVNIVKKTEVQTGGFSKESILPKRNSDKLIARKKDWDPKKYGGFDSPTVAYSVLVVAKVEKGKSKKLKSVKELLGITIMERSSFEKNPIDFLEAKGYKEVKKDLIIKLPKYSLFELENGRKRMLASAGELQKGNELALPSKYVNFLYLASHYEKLKGSPEDNEQKQLFVEQHKHYLDEIIEQISEFSKRVILADANLDKVLSAYNKHRDKPIREQAENIIHLFTLTNLGAPAAFKYFDTTIDRKRYTSTKEVLDATLIHQSITGLYETRIDLSQLGGD

SEQ ID NO: 25 - protein, 1370 aa, Streptococcus agalactiae; identical to SEQ ID NO: 5

SEQ ID NO: 26 - protein, 1173 aa, Rhodospirillum rubrum
MRPIEPWILGLDIGTDSLGWAVFSCEEKGPPTAKELLGGGVRLFDSGRDAKDHTSRQAERGAFRRARRQTRTWPWRRDRLIALFQAAGLTPPAAETRQIALALRREAVSRPLAPDALWAALLHLAHHRGFRSNRIDKRERAAAKALAKAKPAKATAKATAPAKEADDEAGFWEGAEAALRQRMAASGAPTVGALLADDLDRGQPVRMRYNQSDRDGVVAPTRALIAEELAEIVARQSSAYPGLDWPAVTRLVLDQRPLRSKGAGPCAFLPGEDRALRALPTVQDFIIRQTLANLRLPSTSADEPRPLTDEEHAKALALLSTARFVEWPALRRALGLKRGVKFTAETERNGAKQAARGTAGNLTEAILAPLIPGWSGWDLDRKDRVFSDLWAARQDRSALLALIGDPRGPTRVTEDETAEAVADAIQIVLPTGRASLSAKAARAIAQAMAPGIGYDEAVTLALGLHHSHRPRQERLARLPYYAAALPDVGLDGDPVGPPPAEDDGAAAEAYYGRIGNISVHIALNETRKIVNALLHRHGPILRLVMVETTRELKAGADERKRMIAEQAERERENAEIDVELRKSDRWMANARERRQRVRLARRQNNLCPYTSTPIGHADLLGDAYDIDHVIPLARGGRDSLDNMVLCQSDANKTKGDKTPWEAFHDKPGWIAQRDDFLARLDPQTAKALAWRFADDAGERVARKSAEDEDQGFLPRQLTDTGYIARVALRYLSLVTNEPNAVVATNGRLTGLLRLAWDITPGPAPRDLLPTPRDALRDDTAARRFLDGLTPPPLAKAVEGAVQARLAALGRSRVADAGLADALGLTLASLGGGGKNRADHRHHFIDAAMIAVTTRGLINQINQASGAGRILDLRKWPRTNFEPPYPTFRAEVMKQWDHIHPSIRPAHRDGGSLHAATVFGVRNRPDARVLVQRKPVEKLFLDANAKPLPADKIAEIIDGFASPRMAKRFKALLARYQAAHPEVPPALAALAVARDPAFGPRGMTANTVIAGRSDGDGEDAGLITPFRANPKAAVRTMGNAVYEVWEIQVKGRPRWTHRVLTRFDRTQPAPPPPPENARLVMRLRRGDLVYWPLESGDRLFLVKKMAVDGRLALWPARLATGKATALYAQLSCPNINLNGDQGYCVQSAEGIRKEKIRTTSCTALGRLRLSKKAT

SEQ ID NO: 27 - protein, 997 aa, Maritimibacter alkaliphilus
MKVLVDAGLMPSDPAAAKALETLDPYELRATGLDVMLPLTHLGRAVFHLNQRRGFKSNRKTDRGDNESGKIKDATKRLTWAMQEAGARTYGEFLHMRRARASDPRQVPSVRTRLSVASRGGPDSKEEAGYDFYPERAHLEDEFHALWSAQAAFHPDLTCELRDVVFEKIFYQRPLKEPKVGLCLFTAEERLPKAHPLTGRRVLYETVNQLRVTADGRTTRPLTLEERDMIVYALDNKKPVKSLSSMHLKLVALGKLVKLKDGERFTLESGVRDAIACDPIRATMGHPDGFGPAWSRLDWQAQWALIEKLRQVQSDDDFASLVAWLGATHNLSEDHAKRVANLHLPEGYGRLGLTATEAILCNLKAEVCTYSQAVERWGKHHSNQRTGECLEALPYYGEVLDRHVIPGTYNEDDDDVTRYGRITNPTVHIGLNQLRRLVNRIIATYGKPDQIVVELARELKQSEAQKSEALKKIRDTTADAIRRGRQLEEIGQKNTGANRLLLRLWEDLGPAVGPRCCPYTGKPISVTMLFDGACDVDHILPYSRTLDDSFANRTICLREANRQKGDRTPWEAWGGSDQWDAIEANLKDLPENKRKRFAPDAMERFEGERDFLDRALVDTQYLARISRAYLDTLFTEGGHVWVVPGRMTEMLRRHWGLNALLSDKDRGAGKVKNRTDHRHHAIDAAVIAATDHSLVNRISKAAGQGESAGQSAELIARDTPEPWEGFRNDISAQIARIVVSHRADHGRIDVEGRKHGKDSTAGRLHNDTAYGIVDDHTVVSRTPLLSLKPGDIEVTTKGKNIRDTQLQKALSVATTGKDGKGFEEALRNFAEKEGPYQGIRRVRLIETLQSSARVEVGSDEDGQPLKAYKGDSNHCYDLWKLPDGKVVPHVVSTYEAHAGTDKRPHPAAKRILRVFKKDMVAIEQDDQTAIFYVQKLDRANGLFLAPHLEANADARHRNPNDAFKFLQMGAGSVVRNKLRRVYVDEIGRIKDPGPPKH

SEQ ID NO: 28 - protein, 1027 aa, Blastopirellula marina
MFSESGDQPSLVDCGVRIFPEGVERDQQGGEKSKSQSRRVARGIRRQVRRRAQRLRHLKHALITTGLFPADVVDQQEVLASNPYELRSRALSEKLEPYEIGRILLHLAKRRGFLSNRTTDRSGGNELKGILAEMTQLQGEIAAHGCQTLGQYLHQLGDDGETFAQRLRGRHTLRAMYEDEFEKIWERQASYYPALLTEELRGGEEGKQSYPLVPTARRKSESLLKRFGLHGLLFFQRKMYWPKSVIGRCDLEPKEKRCPKADRLAQRFRILQEVNNLRLISPADRKEYTFAEFVGAGADKKLVDYLCEAKERTFPQIRKKFKLPETISFNYERGERSKLQGHETDAHFNGKKGLGKRRWSEIAEDVKDHIIQIVLEEDREDVALRKLTQDCSLTVEEAHKAMALHLPAGYSQYSRVAISRLLPHLELGKLLMGNDASDSAMHAAGYLRPDEREVRQYDLLPEPPDIPNPLVRQALYEVRKVINAIIREYGALGTIRVELAREAKKSAEQRTQIRIANAKRERENAAIAKTLQEMSPAIRPTRRNIQRYLLWKDQGGVCIYTGKVISQAQLFDSGEVDVDHILPRWRSLDDSMANKVIAHRSANNEKGDRTPWEWLGHDKPRFDELLLRAQRLPYGKRQRFIQKEVELTNFVERQLRDTTYVSRLVVQYLKGLGVPITTVKGPMTAELRHHWGLNALLNEDGSQKKNRSDHRHHAIDAIVIGLTDAKRLHALANARGKDLQPPWSEFRSDVATALGRMAVSHRVRRRIQGALHEETIYGPTQKAAQPTSTDQRPWAKDWIEDSQIVVRRKSVSDLTNTKHLAKIRDVTIRKILEDHLRRQKVDPTKPGVIPKDAFAGSNAPQMPSGVPIKKVRLVERGETWRKIGSGEASKFIKPGSNHHISYFAISRKGRESWKAHVTIMLDAACIAKESINNGKIVNRSIGDQGRFLMSLSIGEMFEITNNGGEILLCVVRKIDQSGRIYYKIHDDARESMDLKKDNLYMSPSKMQQFDARKVTVTPLGKIRNAND

SEQ ID NO: 29 - protein, 158 aa, Francisella tularensis
MIDFLLELDPCITIPPYLDNNNRKPPKCQSLILNPKFLDNQYPNWQQYLQELKKLQSIQDYLDSFETDLKDLKSSKDQPYFVEYKSSNQQMASGQRDYKDLDARILQFIFDRVKASDELLLSEIYFQAKKLKQKASSELEKLESSKKLDEVIANSQLS

SEQ ID NO: 30 - protein, 393 aa, Francisella tularensis
MNVKILPIAIDLDVKNTGVFSAFYQKGTSLEKLDNKNGKVYELSKDSYTLLMNNRTAQRHQRRGIDRKQLVKRLFKLVWTEQLNLEWDKDTQQAISFLFNRRGFSFITDGYSTEYLNIVPEQVKAILMDIFDDYNGEDDLDSYLKLATEQESKISEIYNKLMQKILEFKLRKLCTDIKDDKVSTKTLKEITSYEFELLADYLANYSESLKTQKFSYTDKQGNLKELSYYHHDKYNIQEFLKRHATINDEILDTLLTDDFDIWNFNFEKFDFDKNEEKLQSQEDKDHTQAYFHHFVFAVNKIKSEMASGGRHRSQYFQEITNVLDENNHQEGYLKNFCENLHNKKYSNLSVKNLVNLVGNLSNLELKPLRKYFNDKNLIIGMSKSLQKLIATGY

SEQ ID NO: 31 - protein, 1066 aa, Rhodopseudomonas palustris
MSERVVRRILGIDLGIASCGWGVVDISGAGGGIIATGVRCFDAPLIDKTGEPKSATRRTARGQRRIVRRRRQRMNGVRRLLCEFGLLPDPRPDALNQAMRRISTASAAAQVTPWTLRAAAHQRLLSNEELAVVLGHIARHRGFRSNAKNEAGANAADETSKMKKAMEATREGLAKYHAFGDMIANDPKFANRKRNRDKDYSHTAKRSDLEDEVRAILRAQLRFGSAAATETLAQTFADVAFFQRPLQDSEDRVGDCPFEPGQKRAARRAPSFELFRFLSRLANLKLAVGRSPERRLTAEEIALAAKGFGETKKTITFKSLREALDLDPNARFSGIGKDKEASLDVVARTGGAAYGTKTLKDALGDAPWRSLSRTPETLDRIAEILSFREDITSIRNGLEDLGLDSLVVEALMQAAANGDFKEFTRAGHISARAARNIIPGLREGLVYSEACARVGYDHAARLSVPLDQVGSPVTRKALSEALKQVRAVAREYGPIDYFHIELARSVGKSAEERKQLTDGIEARNVEKAKRRKQAEEHLGRAPSDDELLRYELAKEQNFKCIYSGDAIDPAGVAANDTRYQVDHILPWSRFGDDSYLNKTLCTARSNQNKRGRTPFEWFEADKTDVEWMEYVARVENLQEVKGRKKRNYSIKDAAAIEDKFKARNLTDTQWATRLLADELSRMFPPRECERAICGRADGGNDGLTIVEERRVFTRPGAITSKLRRAWGLEGLKKQDGKRVEDDRHHAVDALVLAATTESLLQRLTVEVQRREREGRPDDIFHCAEPWRGFRADVRRTVYGSETMPGIFVSRAERRRARGKAHDATIKQIREIEGERLVFERKPVEKLTDKDLEKIPIPKPYGQVSDPKRLRDELVESLRAWIAAGKPKDRPPLSPKGDVIRKVRIQTNDKVSVEINGGTVDRGDMARVDVFRKKNKKAVWEYYVVPIYPHQIVALNDPPDRAVIAYAEDKDWKEIDSSYEFLWSLFGLSYVEISKANGECIDGYFRGLHRGTGAASVCKHISLGKDATVSGIGLKTLASFKKFTIDRLGRKFEIPREVRTWRGEACT

SEQ ID NO: 32 - protein, 1149 aa, Lactobacillus salivarius
MERYHIGLDIGTSSIGWAVIGDDFKIKRKKGKNLIGVRLFKEGDTAAERRGFRTQRRRLNRRKWRLKLLEEIFDPYMAEVDKYFFARLKESNLSPKDSNKKYLGSLLFPDISDSNFYDKYPTIYHLRRDLMEKDKKFDLREIYLAIHHIVKYRGNFLEKVPAKNYKNSGASIGFLLEEVNDLYGNIIGNEDVAILDNDKFEDVEKIILNDEIRNIDKQKNVGRLLVKDKKEKNIVTAFSKAIFGYKFNLEDLLLIESDEKNKLTFNDENIDDIFNELSHSLNDNQMDLLTKTREIYFKFKLNMIVPTGYTISESMIEKYEMHKAHLKMYKEFINTLNAKDRKILKNAYSDYINNEKAKAANAQENFYKTVKKTIKENDSDTAKKIIGLIDEGNFMPKQRTGENGVIPHQLHQIELDRIIENQAKYYPWLAEENPVEKNRKFAKYKLDELVTFRVPYYVGPLIDKTESNKNEKETKFAWMVRKAKGTITPWNFENLVDRTESANRFIKRMTSKDTYIIGEDVLPASSLLYEKYKVLNELNNIKVNKKKLDVEQKQHVYLDLFTTRKNVTKDDLATSLNCDVESITGLTDNKKFNSSLSSYIDLKAILGNIVDDYSKNEDLEKIIEYSTIFEDGNIYKEKLSEISWLTDEQIEKLSNIHFKGWGRLSKKLLTQITNENGERIIDTLWNTSNNFIQVISDESIQAKLAEINGEYANKYNLEDILDEAYTSPQNKKAIRQVMKVVEDIEKAMKCEPTSIAIEFTREKRKSKLTNTRYKKISETYEKITDELISEYELGKLQSELDSKVNNMRDRYYLYFMQLGRDMYTGEKMNIDELHQKYDIDHILPQSFIKDDSLNNRVLTSKSVNIKEKSDKTAADLYAAKMGDFWRKLRKQGLMTEQKYKNLLTRTDSINKYTKQSFIKRQLVETSQVVKLAANILQDKYRNTKIIEIRARLNSDLRKKYELIKNREVNDYHHAIDGYLTTFVGQYLYKVYPKLRSYFVYDDFKKLDSNYLKHMDKFNFIWKLEDKKAEDVYDKVNDEFVLNVPEMKEYIRKIYNYKYMLVSKEVTTKNGAFYDQTKYNAKTINLIPIKKDKPTNIYGGYKGKVSSYMMLVKIQKKKEVIYKFVGVPRLWTDELDRLIDTDEKKALLKK

SEQ ID NO: 33 - protein, 1064 aa, Rhodopseudomonas palustris
MSECVTRRILGIDLGIASCGWGVIEVGEASGSIIASGVRCFDAPLIDKTGEPKSATRRTARGQRRIIRRRRQRMNAVRRLLAEFGVLTGRSPDALHQALLRLSQSVAGSQVTPWTLRAAAHERKLTNDELAVVLGHIARHRGFRSNSKNDGGANAADETSKMKKAMETTREGLARYHSFGAMIASDPKFADRKRNRDKDYSHTAKRSDLEDEVRTIFRSQTRFGSLVASEKLSQAFADAAFFQRPLQDSEDMVGSCPFEPGQKRTARRAPSFELFRFLSRLANLKLTVGRAPERRLTPDEIALAAKGFGETKKSITFKSLREALDLDPNARFSGVAKEKESTLDVAARTGGAAYGTKTLKDALGDAPWRSLSRMPEKLDRIAEILSFREDMKAIRNGLEEVGLDGLVVDALMQATANGDFKDFTRAAHISALAARNIIPGLREGLVYSDACTRVGYDHAARPAVPLSQIGSPVTRKALSEALKQVRAVAREYGPIDYFHIELARSIGKSAEERKKLTDGIEARNVEKEKRRKEAAEHLGRAPSDDELLRYELAKEQNFKCIYSGDPIDPAGISANDTRYQVDHILPWSRFGDDSYVNKTLCTARSNQNKRGRTPFEWFDADKTEAEWMEYSARVEDLKEVKGRKKRNYSIKDAASVEDKFKARNLTDTQWATRLLADELKRMFPPRECERVVTVRADGGNDGLSIVEERRVFTRPGAITSKLRRAWGLEGLKKQDGKRVEDDRHHAVDALVLAATTESLLNRLTVEVQQREREGRQDDIFHCSQPWPGFRVDVQRTVYGSETMPGIFVSRAERRRARGKAHDATVKQIRDIDGERIVFERKPIEKLTDKDLERIPVPEPYGKAADPKKLRDELVENLRAWIAAGKPKDKPPRSPKGDIIRKVRIETKDKVAVEINGGTVDRGDMARVDVFRKKNKKGVWEFYVIPIYPHQIVASALPPNRAVIAYKAESEWTAIDGCFEFAWSLNPMSYLELVKSNGELIEGYFRSMDRTTGAINLSPMSTNSETIRSIGVKTLSSFRKFTVDRLGRKFEIPREVRTWRGEACT

SEQ ID NO: 34 - protein, 1166 aa, Nitrobacter hamburgensis
MHVEIDFPHFSRGDSHLAMNKNEILRGSSVLYRLGLDLGSNSLGWFVTHLEKRGDRHEPVALGPGGVRIFPDGRDPQSGTSNAVDRRMARGARKRRDRFVERRKELIAALIKYNLLPDDARERRALEVLDPYALRKTALTDTLPAHHVGRALFHLNQRRGFQSNRKTDSKQSEDGAIKQAASRLATDKGNETLGVFFADMHLRKSYEDRQTAIRAELVRLGKDHLTGNARKKIWAKVRKRLFGDEVLPRADAPHGVRARATITGTKASYDYYPTRDMLRDEFNAIWAGQSAHHATITDEARTEIEHIIFYQRPLKPAIVGKCTLDPATRPFKEDPEGYRAPWSHPLAQRFRILSEARNLEIRDTGKGSRRLTKEQSDLVVAALLANREVKFDKLRTLLKLPAEARFNLESDRRAALDGDQTAARLSDKKGFNKAWRGFPPERQIAIVARLEETEDENELIAWLEKECALDGAAAARVANTTLPDGHCRLGLRAIKKIVPIMQDGLDEDGVAGAGYHIAAKRAGYDHAKLPTGEQLGRLPYYGQWLQDAVVGSGDARDQKEKQYGQFPNPTVHIGLGQLRRVVNDLIDKYGPPTEISIEFTRALKLSEQQKAERQREQRRNQDKNKARAEELAKFGRPANPRNLLKMRLWEELAHDPLDRKCVYTGEQISIERLLSDEVDIDHILPVAMTLDDSPANKIICMRYANRHKRKQTPSEAFGSSPTLQGHRYNWDDIAARATGLPRNKRWRFDANAREEFDKRGGFLARQLNETGWLARLAKQYLGAVTDPNQIWVVPGRLTSMLRGKWGLNGLLPSDNYAGVQDKAEEFLASTDDMEFSGVKNRADHRHHAIDGLVTALTDRSLLWKMANAYDEEHEKFVIEPPWPTMRDDLKAALEKMVVSHKPDHGIEGKLHEDSAYGFVKPLDATGLKEEEAGNLVYRKAIESLNENEVDRIRDIQLRTIVRDHVNVEKTKGVALADALRQLQAPSDDYPQFKHGLRHVRILKKEKGDYLVPIANRASGVAYKAYSAGENFCVEVFETAGGKWDGEAVRRFDANKKNAGPKIAHAPQWRDANEGAKLVMRIHKGDLIRLDHEGRARIMVVHRLDAAAGRFKLADHNETGNLDKRHATNNDIDPFRWLMASYNTLKKLAAVPVRVDELGRVWRVMPN

SEQ ID NO: 35 - protein, 641 aa, Nitrobacter hamburgensis
MHKRNSRSYRLGLDLGSNSLGWFVTHLEKRGDRYEPVALDPGGVRIFPDGRDPQSGMSNAVDRRMARGARKRRDRFVDPYALRKAALTNALPAHRVGRAIFHLNQRRGFQSNRKTDRKQSEDGAIKQAASKLKARMHEEAAPTLGAFFADMHLRKSYDDQQTAIRAELVRLGKDHLTGNARKKVWAKVRKRLFGDEVLRPKDTSDGARARATTTGTKASYDFYPTRAMLLDEFNAIWAAQREHHLAMTDEAKAEIEHIIFYHRPLKPAIVGKCTLDPATRPFKEDPEGYRAPWSHPLAQRFRILSEARNLEIRETGKTSRRLTKDQSDLVVAALLANREVKFDKLRTLLKLPAEARFNLESDRRSTATRPPHGCRTRRASIRRGAGFLRNGRSRSSPDWKKPKTKTNCSHGSKWNAHLTAQRPRASPIRRCRTAIAGSACAQSKRSCRSCRTSSMRMALRAPAITSWPSVPATTIPVDTFQQGGNAFGRILSVVTIELFAITDRVDPVQEQDARCFALRIAECRSDGLQHFAEVSLGLPPRNAAQDQRHSAGLCQSSCVGRFVPGTPCRRTPRSTSLHGKEPSAHAFGSTARSRPQLPASPRPCMSFRDGTSSSPARMPETLDRCAISRSNRSSVCRAERL

SEQ ID NO: 36 - protein, 1368 aa, Streptococcus pyogenes
MDKKYSIGLDIGTNSVGWAVITDDYKVPSKKFKVLGNTDRHSIKKNLIGALLFDSGEIAEATRLKRTARRRYTRRKNRICYLQEIFSNEMAKVDDSFFHRLEESFLVEEDKKHERHPIFGNIVDEVAYHEKYPTIYHLRKKLVDSTDKADLRLIYLALAHMIKFRGHFLIEGDLNPDNSDVDKLFIQLVQTYNQLFEENPINASGVDAKAILSARLSKSRRLENLIAQLPGEKKNGLFGNLIALSLGLTPNFKSNFDLAEDAKLQLSKDTYDDDLDNLLAQIGDQYADLFLAAKNLSDAILLSDILRLNSEITKAPLSASMIKRYDEHHQDLTLLKALVRQQLPEKYKEIFFDQSKNGYAGYIDGGASQEEFYKFIKPILEKMDGTEELLAKLNREDLLRKQRTFDNGSIPHQIHLGELHAILRRQEDFYPFLKDNREKIEKILTFRIPYYVGPLARGNSRFAWMTRKSEETITPWNFEEVVDKGASAQSFIERMTNFDKNLPNEKVLPKHSLLYEYFTVYNELTKVKYVTEGMRKPAFLSGEQKKAIVDLLFKTNRKVTVKQLKEDYFKKIECFDSVEISGVEDRFNASLGTYHDLLKIIKDKDFLDNEENEDILEDIVLTLTLFEDREMIEERLKTYAHLFDDKVMKQLKRRRYTVWGRLSRKLINGIRDKQSGKTILDFLKSDGFANRNFMQLIHDDSLTFKEDIQKAQVSGQGDSLHEHIANLAGSPAIKKGILQTVKVVDELVKVMGRHKPENIVIEMARENQTTQKGQKNSRERMKRIEEGIKELGSQILKEHPVENTQLQNEKLYLYYLQNGRDMYVDQELDINRLSDYDVDHIVPQSFIKDDSIDNKVLTRSDKNRGKSDNVPSEEVVKKMKNYWRQLLNAKLITQRKFDNLTKAERGGLSELDKAGFIKRQLVETRQITKHVAQILDSRMNTKYDENDKLIREVKVITLKSKLVSDFRKDFQFYKVREINNYHHAHDAYLNAVVGTALIKKYPKLESEFVYGDYKVYDVRKMLAKSEQEIGKATAKYFFYSNIMNFFKTEITLANGEIRKRPLIETNGETGEIVWDKGRDFATVRKVLSMPQVNIVKKTEVQTGGFSKESILPKRNSDKLIARKKDWDPKKYGGFDSPTVAYSVLVVAKVEKGKSKKLKSVKELLGITIMERSSFEKNPIDFLEAKGYKEVRKDLIIKLPKYSLFELENGRKRMLASAGELQKGNELALPSKYVNFLYLASHYEKLKGSPEDNEQKQLFVEQHKHYLDEIIEQISEFSKRVILADANLDKVLSAYNKHRDKPIREQAENIIHLFTLTNLGAPTAFKYFDTTIDRKRYTSTKEVLDATFIHQSITGLYETRIDLSQLGGD

SEQ ID NO: 37 - protein, 1368 aa, Streptococcus pyogenes
MDKKYSIGLDIGTNSVGWAVITDDYKVPSKKFKVLGNTDRHSIKKNLIGALLFDSGETAEATRLKRTARRRYTRRKNRICYLQEIFSNEMAKVDDSFFHRLEESFLVEEDKKHERHPIFGNIVDEVAYHEKYPTIYHLRKKLVDSTDKADLRLIYLALAHMIKFRGHFLIEGDLNPDNSDVDKLFIQLVQTYNQLFEENPINASGVDAKAILSARLSKSRRLENLIAQLPGEKKNGLFGNLIALSLGLTPNFKSNFDLAEDAKLQLSKDTYDDDLDNLLAQIGDQYADLFLAAKNLSDAILLSDILRLNSEITKAPLSASMIKRYDEHHQDLTLLKALVRQQLPEKYKEIFFDQSKNGYAGYIDGGASQEEFYKFIKPILEKMDGTEELLAKLNREDLLRKQRTFDNGSIPHQIHLGELHAILRRQEDFYPFLKDNREKIEKILTFRIPYYVGPLARGNSRFAWMTRKSEETITPWNFEEVVDKGASAQSFIERMTNFDKNLPNEKVLPKHSLLYEYFTVYNELTKVKYVTEGMRKPAFLSGEQKKAIVDLLFKTNRKVTVKQLKEDYFKKIECFDSVEISGVEDRFNASLGTYHDLLKIIKDKDFLDNEENEDILEDIVLTLTLFEDREMIEERLKTYAHLFDDKVMKQLKRRRYTGWGRLSRKLINGIRDKQSGKTILDFLKSDGFANRNFMQLIHDDSLTFKEDIQKAQVSGQGDSLHEHIANLAGSPAIKKGILQTVKVVDELVKVMGRHKPENIVIEMARENQTTQKGQKNSRERMKRIEEGIKELGSQILKEHPVENTQLQNEKLYLYYLQNGRDMYVDQELDINRLSDYDVDHIVPQSFIKDDSIDNKVLTRSDKNRGKSDNVPSEEVVKKMKNYWRQLLNAKLITQRKFDNLTKAERGGLSELDKAGFIKRQLVETRQITKHVAQILDSRMNTKYDENDKLIREVKVITLKSKLVSDFRKDFQFYKVREINNYHHAHDAYLNAVVGTALIKKYPKLESEFVYGDYKVYDVRKMIAKSEQEIGKATAKYFFYSNIMNFFKTEITLANGEIRKRPLIETNGETGEIVWDKGRDFATVRKVLSMPQVNIVKKTEVQTGGFSKESILPKRNSDKLIARKKDWDPKKYGGFDSPTVAYSVLVVAKVEKGKSKKLKSVKELLGLTIMERSSFEKNPIDFLEAKGYKEVKKDLIIKLPKYSLFELENGRKRMLASAGELQKGNELALPSKYVNFLYLASHYEKLKGSPEDNEQKQLFVEQHKHYLDEIIEQISEFSKRVILADANLDKVLSAYNKHRDKPIREQAENIIHLFTLTNLGAPAAFKYFDTTIDRKRYTSTKEVLDATLIHQSITGLYETRIDLSQLGGD

SEQ ID NO: 38 - protein, 1368 aa, Streptococcus pyogenes
MDKKYSIGLDIGTNSVGWAVITDDYKVPSKKFKVLGNTDRHSIKKNLIGALLFDSGEIAEATRLKRTARRRYTRRKNRICYLQEIFSNEMAKVDDSFFHRLEESFLVEEDKKHERHPIFGNIVDEVAYHEKYPTIYHLRKKLVDSTDKADLRLIYLALAHMIKFRGHFLIEGDLNPDNSDVDKLFIQLVQTYNQLFEENPINASGVDAKAILSARLSKSRRLENLIAQLPGEKKNGLFGNLIALSLGLTPNFKSNFDLAEDAKLQLSKDTYDDDLDNLLAQIGDQYADLFLAAKNLSDAILLSDILRLNSEITKAPLSASMIKRYDEHHQDLTLLKALVRQQLPEKYKEIFFDQSKNGYAGYIDGGASQEEFYKFIKPILEKMDGTEELLAKLNREDLLRKQRTFDNGSIPHQIHLGELHAILRRQEDFYPFLKDNREKIEKILTFRIPYYVGPLARGNSRFAWMTRKSEETITPWNFEEVVDKGASAQSFIERMTNFDKNLPNEKVLPKHSLLYEYFTVYNELTKVKYVTEGMRKPAFLSGEQKKAIVDLLFKTNRKVTVKQLKEDYFKKIECFDSVEISGVEDRFNASLGTYHDLLKIIKDKDFLDNEENEDILEDIVLTLTLFEDREMIEERLKTYAHLFDDKVMKQLKRRRYTGWGRLSRKLINGIRDKQSGKTILDFLKSDGFANRNFMQLIHDDSLTFKEDIQKAQVSGQGDSLHEHIANLAGSPAIKKGILQTVKVVDELVKVMGRHKPENIVIEMARENQTTQKGQKNSRERMKRIEEGIKELGSQILKEHPVENTQLQNEKLYLYYLQNGRDMYVDQELDINRLSDYDVDHIVPQSFIKDDSIDNKVLTRSDKNRGKSDNVPSEEVVKKMKNYWRQLLNAKLITQRKFDNLTKAERGGLSELDKAGFIKRQLVETRQITKHVAQILDSRMNTKYDENDKLIREVKVITLKSKLVSDFRKDFQFYKVREINNYHHAHDAYLNAVVGTALIKKYPKLESEFVYGDYKVYDVRKMLAKSEQEIGKATAKYFFYSNIMNFFKTEITLANGEIRKRPLIETNGETGEIVWDKGRDFATVRKVLSMPQVNIVKKTEVQTGGFSKESILPKRNSDKLIARKKDWDPKKYGGFDSPTVAYSVLVVAKVEKGKSKKLKSVKELLGITIMERSSFEKNPIDFLEAKGYKEVRKDLIIKLPKYSLFELENGRKRMLASAGELQKGNELALPSKYVNFLYLASHYEKLKGSPEDNEQKQLFVEQHKHYLDEIIEQISEFSKRVILADANLDKVLSAYNKHRDKPIREQAENIIHLFTLTNLGAPTAFKYFDTTIDRKRYTSTKEVLDATFIHQSITGLYETRIDLSQLGGD

SEQ ID NO: 39 - protein, 1371 aa, Streptococcus pyogenes
MDKKYSIGLDIGTNSVGWAVITDDYKVPSKKFKVLGNTDRHSIKKNLIGALLFDSGETAEATRLKRTARRRYTRRKNRICYLQEIFSNEMAKVDDSFFHRLEESFLVEEDKKHERHPIFGNIVDEVAYHEKYPTIYHLRKKLADSTDKADLRLIYLALAHMIKFRGHFLIEGDLNPDNSDVDKLFIQLVQTYNQLFEENPINASRVDAKAILSARLSKSRRLENLIAQLPGEKKNGLFGNLIALSLGLTPNFKSNFDLAEDAKLQLSKDTYDDDLDNLLAQIGDQYADLFLAAKNLSDATLLSDILRVNSEITKAPLSASMIKRYDEHHQDLTLLKALVRQQLPEKYKEIFFDQSKNGYAGYIDGGASQEEFYKFIKPILEKMDGTEELLAKLNREDLLRKQRTFDNGSIPHQIHLGELHAILRRQEDFYPFLKDNREKIEKILTFRIPYYVGPLARGNSRFAWMTRKSEETITPWNFEEVVDKGASAQSFIERMTNFDKNLPNEKVLPKHSLLYEYFTVYNELTKVKYVTEGMRKPAFLSGEQKKAIVDLLFKTNRKVTVKQLKEDYFKKIECFDSVEISGVEDRFNASLGTYHDLLKIIKDKDFLDNEENEDILEDIVLTLTLFEDKEMIEERLKTYAHLFDDKVMKQLKRRHYTGWGRLSRKLINGIRDKQSGKTILDFLKSDGFANRNFIQLIHDDSLTFKEAIQKAQVSGQGHSLHEQIANLAGSPAIKKGILQSVKVVDELVKVMGHKPENIVIEMARENQTTQKGQKNSRERMKRIEEGIKELGSQILKEHPVENTQLQNEKLYLYYLQNGRDMYVDQELDINRLSDYDVDHIVPQSFIKDDSIDNKVLTRSDKNRGKSDDVPSEEVVKKMKNYWRQLLNAKLITQRKFDNLTKAERGGLSELDKAGFIKRQLVETRQITKHVAQILDSRMNTKYDENDKLIREVKVITLKSKLVSDFRKDFQFYKVREINNYHHAHDAYLNAVVGTALIKKYPKLESEFVYGDYKVYDVRKMIAKSEQEIGKATAKRFFYSNIMNFFKTEITLANGEIRKRPLIETNEETGEIVWDKGRDFATVRKVLSMPQVNIVKKTEVQTGALTNESIYARGSFDKLISRKHRFESSKYGGFGSPTVTYSVLVVAKSKVQDGKVKKIKTGKELIGITLLDKLVFEKNPLKFIEDKGYGNVQIDKCIKLPKYSLFEFENGTRRMLASVMANNNSRGDLQKANEMFLPAKLVTLLYHAHKIESSKELEHEAYILDHYNDLYQLLSYIERFASLYVDVEKNISKVKELFSNIESYSISEICSSVINLLTLTASGAPADFKFLGTTIPRKRYGSPQSILSSTLIHQSITGLYETRIDLSQLGSD

SEQ ID NO: 40 - protein, 1121 aa, Streptococcus thermophilus
MSDLVLGLDIGIGSVGVGILNKVTGEIIHKNSRIFPAAQAENNLVRRTNRQGRRLARRKKHRRVRLNRLFEESGLITDFTKISINLNPYQLRVKGLTDELSNEELFIALKNMVKHRGISYLDDASDDGNSSVGDYAQIVKENSKQLETKTPGQIQLERYQTYGQLRGDFTVEKDGKKHRLINVFPTSAYRSEALRILQTQQEFNPQITDEFINRYLEILTGKRKYYHGPGNEKSRTDYGRYRTSGETLDNIFGILIGKCTFYPDEFRAAKASYTAQEFNLLNDLNNLTVPTETKKLSKEQKNQIINYVKNEKAMGPAKLFKYIAKLLSCDVADIKGYRIDKSGKAEIHTFEAYRKMKTLETLDIEQMDRETLDKLAYVLTLNTEREGIQEALEHEFADGSFSQKQVDELVQFRKANSSIFGKGWHNFSVKLMMELIPELYETSEEQMTILTRLGKQKTTSSSNKTKYIDEKLLTEEIYNPVVAKSVRQAIKIVNAAIKEYGDFDNIVIEMARETNEDDEKKAIQKIQKANKDEKDAAMLKAANQYNGKAELPHSVFHGHKQLATKIRLWHQQGERCLYTGKTISIHDLINNSNQFEVDHILPLSITFDDSLANKVLVYATANQEKGQRTPYQALDSMDDAWSFRELKAFVRESKTLSNKKKEYLLTEEDISKFDVRKKFIERNLVDTRYASRVVLNALQEHFRAHKIDTKVSVVRGQFTSQLRRHWGIEKTRDTYHHHAVDALIIAASSQLNLWKKQKNTLVSYSEDQLLDIETGELISDDEYKESVFKAPYQHFVDTLKSKEFEDSILFSYQVDSKFNRKISDATIYATRQAKVGKDKADETYVLGKIKDIYTQDGYDAFMKIYKKDKSKFLMYRHDPQTFEKVIEPILENYPNKQINEKGKEVPCNPFLKYKEEHGYIRKYSKKGNGPEIKSLKYYDSKLGNHIDITPKDSNNKVVLQSVSPWRADVYFNKTTGKYEILGLKYADLQFEKGTGTYKISQEKYNDIKKKEGVDSDSEFKFTLYKNDLLLVKDTETKEQQLFRFLSRTMPKQKHYVELKPYDKQKFEGGEALIKVLGNVANSGQCKKGLGKSNISIYKVRTDVLGNQHIIKNEGDKPKLDF

SEQ ID NO: 41 - protein, 1388 aa, Streptococcus thermophilus
MTKPYSIGLDIGTNSVGWAVTTDNYKVPSKKMKVLGNTSKKYIKKNLLGVLLFDSGITAEGRRLKRTARRRYTRRRNRILYLQEIFSTEMATLDDAFFQRLDDSFLVPDDKRDSKYPIFGNLVEEKAYHDEFPTIYHLRKYLADSTKKADLRLVYLALAHMIKYRGHFLIEGEFNSKNNDIQKNFQDFLDTYNAIFESDLSLENSKQLEEIVKDKISKLEKKDRILKLFPGEKNSGIFSEFLKLIVGNQADFRKCFNLDEKASLHFSKESYDEDLETLLGYIGDDYSDVFLKAKKLYDAILLSGFLTVTDNETEAPLSSAMIKRYNEHKEDLALLKEYIRNISLKTYNEVFKDDTKNGYAGYIDGKTNQEDFYVYLKKLLAEFEGADYFLEKIDREDFLRKQRTFDNGSIPYQIHLQEMRAILDKQAKFYPFLAKNKERIEKILTFRIPYYVGPLARGNSDFAWSIRKRNEKITPWNFEDVIDKESSAEAFINRMTSFDLYLPEEKVLPKHSLLYETFNVYNELTKVRFIAESMRDYQFLDSKQKKDIVRLYFKDKRKVTDKDIIEYLHAIYGYDGIELKGIEKQFNSSLSTYHDLLNIINDKEFLDDSSNEAIIEEIIHTLTIFEDREMIKQRLSKFENIFDKSVLKKLSRRHYTGWGKLSAKLINGIRDEKSGNTILDYLIDDGISNRNFMQLIHDDALSFKKKIQKAQIIGDEDKGNIKEVVKSLPGSPAIKKGILQSIKIVDELVKVMGGRKPESIVVEMARENQYTNQGKSNSQQRLKRLEKSLKELGSKILKENIPAKLSKIDNNALQNDRLYLYYLQNGKDMYTGDDLDIDRLSNYDIDHIIPQAFLKDNSIDNKVLVSSASNRGKSDDVPSLEVVKKRKTFWYQLLKSKLISQRKFDNLTKAERGGLSPEDKAGFIQRQLVETRQITKHVARLLDEKFNNKKDENNRAVRTVKIITLKSTLVSQFRKDFELYKVREINDFHHAHDAYLNAVVASALLKKYPKLEPEFVYGDYPKYNSFRERKSATEKVYFYSNIMNIFKKSISLADGRVIERPLIEVNEETGESVWNKESDLATVRRVLSYPQVNVVKKVEEQNHGLDRGKPKGLFNANLSSKPKPNSNENLVGAKEYLDPKKYGGYAGISNSFTVLVKGTIEKGAKKKITNVLEFQGISILDRINYRKDKLNFLLEKGYKDIELIIELPKYSLFELSDGSRRMLASILSTNNKRGEIHKGNQIFLSQKFVKLLYHAKRISNTINENHRKYVENHKKEFEELFYYILEFNENYVGAKKNGKLLNSAFQSWQNHSIDELCSSFIGPTGSERKGLFELTSRGSAADFEFLGVKIPRYRDYTPSSLLKDATLIHQSVTGLYETRIDLAKLGEG

SEQ ID NO: 42 - protein, 1138 aa, Acidothermus cellulolyticus
MGGSEVGTVPVTWRLGVDVGERSIGLAAVSYEEDKPKEILAAVSWIHDGGVGDERSGASRLALRGMARRARRLRRFRRARLRDLDMLLSELGWTPLPDKNVSPVDAWLARKRLAEEYVVDETERRRLLGYAVSHMARHRGWRNPWTTIKDLKNLPQPSDSWERTRESLEARYSVSLEPGTVGQWAGYLLQRAPGIRLNPTQQSAGRRAELSNATAFETRLRQEDVLWELRCIADVQGLPEDVVSNVIDAVFCQKRPSVPAERIGRDPLDPSQLRASRACLEFQEYRIVAAVANLRIRDGSGSRPLSLEERNAVIEALLAQTERSLTWSDIALEILKLPNESDLTSVPEEDGPSSLAYSQFAPFDETSARIAEFIAKNRRKIPTFAQWWQEQDRTSRSDLVAALADNSIAGEEEQELLVHLPDAELEALEGLALPSGRVAYSRLTLSGLTRVMRDDGVDVHNARKTCFGVDDNWRPPLPALHEATGHPVVDRNLAILRKFLSSATMRWGPPQSIVVELARGASESRERQAEEEAARRAHRKANDRIRAELRASGLSDPSPADLVRARLLELYDCHCMYCGAPISWENSELDHIVPRTDGGSNRHENLAITCGACNKEKGRRPFASWAETSNRVQLRDVIDRVQKLKYSGNMYWTRDEFSRYKKSVVARLKRRTSDPEVIQSIESTGYAAVALRDRLLSYGEKNGVAQVAVFRGGVTAEARRWLDISIERLFSRVAIFAQSTSTKRLDRRHHAVDAVVLTTLTPGVAKTLADARSRRVSAEFWRRPSDVNRHSTEEPQSPAYRQWKESCSGLGDLLISTAARDSIAVAAPLRLRPTGALHEETLRAFSEHTVGAAWKGAELRRIVEPEVYAAFLALTDPGGRFLKVSPSEDVLPADENRHIVLSDRVLGPRDRVKLFPDDRGSIRVRGGAAYIASFHHARVFRWGSSHSPSFALLRVSLADLAVAGLLRDGVDVFTAELPPWTPAWRYASIALVKAVESGDAKQVGWLVPGDELDFGPEGVTTAAGDLSMFLKYFPERHWVVTGFEDDKRINLKPAFLSAEQAEVLRTERSDRPDTLTEAGEILAQFFPRCWRATVAKVLCHPGLTVIRRTALGQPRWRRGHLPYSWRPWSADPWSGGTP

SEQ ID NO: 43 - protein, 1629 aa, Francisella novicida
MNFKILPIAIDLGVKNTGVFSAFYQKGTSLERLDNKNGKVYELSKDSYTLLMNNRTARRHQRRGIDRKQLVKRLFKLIWTEQLNLEWDKDTQQAISFLFNRRGFSFITDGYSPEYLNIVPEQVKAILMDIFDDYNGEDDLDSYLKLATEQESKISEIYNKLMQKILEFKLMKLCTDIKDDKVSTKTLKEITSYEFELLADYLANYSESLKTQKFSYTDKQGNLKELSYYHHDKYNIQEFLKRHATINDRILDTLLTDDLDIWNFNFEKFDFDKNEEKLQNQEDKDHIQAHLHHFVFAVNKIKSEMASGGRHRSQYFQEITNVLDENNHQEGYLKNFCENLHNKKYSNLSVKNLVNLIGNLSNLELKPLRKYFNDKIHAKADHWDEQKFTETYCHWILGEWRVGVKDQDKKDGAKYSYKDLCNELKQKVTKAGLVDFLLELDPCRTIPPYLDNNNRKPPKCQSLILNPKFLDNQYPNWQQYLQELKKLQSIQNYLDSFETDLKVLKSSKDQPYFVEYKSSNQQIASGQRDYKDLDARILQFIFDRVKASDELLLNEIYFQAKKLKQKASSELEKLESSKKLDEVIANSQLSQILKSQHTNGIFEQGTFLHLVCKYYKQRQRARDSRLYIMPEYRYDKKLHKYNNTGRFDDDNQLLTYCNHKPRQKRYQLLNDLAGVLQVSPNFLKDKIGSDDDLFISKWLVEHIRGFKKACEDSLKIQKDNRGLLNHKINIARNTKGKCEKEIFNLICKIEGSEDKKGNYKHGLAYELGVLLFGEPNEASKPEFDRKIKKFNSIYSFAQIQQIAFAERKGNANTCAVCSADNAHRMQQIKITEPVEDNKDKIILSAKAQRLPAIPTRIVDGAVKKMATILAKNIVDDNWQNIKQVLSAKHQLHIPIITESNAFEFEPALADVKGKSLKDRRKKALERISPENIFKDKNNRIKEFAKGISAYSGANLTDGDFDGAKEELDHIIPRSHKKYGTLNDEANLICVTRGDNKNKGNRIFCLRDLADNYKLKQFETTDDLEIEKKIADTIWDANKKDFKFGNYRSFINLTPQEQKAFRHALFLADENPIKQAVIRAINNRNRTFVNGTQRYFAEVLANNIYLRAKKENLNTDKISFDYFGIPTIGNGRGIAEIRQLYEKVDSDIQAYAKGDKPQASYSHLIDAMLAFCIAADEHRNDGSIGLEIDKNYSLYPLDKNTGEVFTKDIFSQIKITDNEFSDKKLVRKKAIEGFNTHRQMTRDGIYAENYLPILIHKELNEVRKGYTWKNSEEIKIFKGKKYDIQQLNNLVYCLKFVDKPISIDIQISTLEELRNILTTNNIAATAEYYYINLKTQKLHEYYIENYNTALGYKKYSKEMEFLRSLAYRSERVKIKSIDDVKQVLDKDSNFIIGKITLPFKKEWQRLYREWQNTTIKDDYEFLKSFFNVKSITKLHKKVRKDFSLPISTNEGKFLVKRKTWDNNFIYQILNDSDSRADGTKPFIPAFDISKNEIVEAIIDSFTSKNIFWLPKNIELQKVDNKNIFAIDTSKWFEVETPSDLRDIGIATIQYKIDNNSRPKVRVKLDYVIDDDSKINYFMNHSLLKSRYPDKVLEILKQSTIIEFESSGFNKTIKEMLGMKLAGIYNETSNN

SEQ ID NO: 44 - protein, 1068 aa, Verminephrobacter eiseniae
MNKAVAYRLALDLGSTSLGWAIFRLNEAREPTAIIRAGVRIFSDGRNANSEPLAVHRRVARAMRRRRDRLLKRKKRMHDQLVQHGFFPAEVAERKELERLNPYQLRAKGLHEALTPGEFARALFHINQRRGFKSNRKTDRKDNDSGALKQAISELRKRIQDSDCATAGEWFWKERMQQKPEGVRGQWVRARYRKTPSTTDEGKKRIGYDLYVDRAMVEQEFDALWAAQAALQPGLFTEAARAELKDTLLYQRDLRPVKPGRCTLLPAEERAPLALPSTQRFRILQEVNNLRLLDEALREVPLNLAQRDAVVSALEGKKELSFAAIRKLLTLSGKFNLEDEKRAELKGNATSVILARKDLFGDAWAGFDAAVQDEIVWRLVSQESEGALIAWLQQHTGVDGVCAEAIVNTRLPDGYGRLSRKALERIVPALQREVCTYDKAVQAAGFAHHSDLGFDFDYAEDEVQQVGEHTIASTGEVQAQYAFKQLPYYGKALQRHVAFGSGDAKDHEEKCYGKIANPTVHIGLNQVRTVVNALIRRYGHPTEVVVELARDLKQSREQKQQTQREQADNQKRNEDIRKRIAPILETSPERVRDRDIKKWILWEELNKKDIADRHCPYSGERISATMLLSEAVEIEHILPFSRTLDDSLNNRTVAMRRANRIKGDRTPWEARADFEAQGWRYEAILQRAEGMPPRKRYRFAEDGYQRWLGKDRNFLARALNDTSYLSRLAANYLRLVCPQGVRVIPGQMTDKLRGKFGLNSVLGLDGKKNRNDHRHHAVDACVIGVTDQGLMQRFANASKQARENGLTRLVQDMLLPWWPSYYDHVERAVRHIRVSHRPDHGFEGAMMKGTAHGIREDGIREDGRIKQRPKAKGSADHKTITLIPIDEPRQLARHGVDAEGKPLPYKGYASGSNYCIEITKNGKGKWEGQVISTFDAYRIKAAADAAARAGQVISTVEADSIVRKSGWERLRGAQSQNGQPLVMRLVIGDSVRMEVDGRDEVMRVVKMSGKEMVFAPVREANVDKRNNMPDEQDPFTYTYKRADQLRKAKARQVTISPIGELRDPGFKG

SEQ ID NO: 45 - protein, 1125 aa, Francisella tularensis
MNVKILPIAIDLDVKNTGVFSAFYQKGTSLEKLDNKNGKVYELSKDSYTLLMNNRTARRHQRRGIDRKQLVKRLFKLVWTEQLNLEWDKDTQQAISFLFNRRGFSFITDGYSTEYLNIVPEQVKAILMDIFDDYNGEDDLDSYLKLATEQESKISEIYNKLMQKILEFKLRKLCTDIKDDKVSTKTLKEITSYEFELLADYLANYSESLKIQKFSYTDKQGNLKELSYYHHDKYNIQEFLKRHATINDEILDTLLTDDFDIWNFNFEKFDFDKNEEKLQNQEDKDHTQAHLHHFVFAVNKIKSEMASGGRHRSQYFQEITNVLDENNHQEGYLKNFCENLHNKKYSNLSVKNLVNLVGNLSNLELKPLRKYFNDKIHAKADHWDEQKFTETYCHWILGEWRVGVKDQDKKDGAKYSYKDLCNELKQKVTKAGLIDFLLELDPCRTIPPYLDNNNRKPPKCQSLILNPKFLDNQYPNWQQYLQELKKLQSIQDYLDSFETDLKDLKSSKDQPYFVEYKSSNQQMASGQRDYKDLDARILQFIFDRVKASDELLLNEIYFQAKKLKQKASSELEKLESSKKLDEVIANSQLSQILKSQHTNGIFEQGTFLHLVCKYYKQRQRARDSRLYIMPEYRYDKKLDKYNNTGRFDDNNQLLTYCNHKPRQKRYQLLNDLAGVLQVSRNQLLSSVEEWFQQAQRVGEISKSQDEQIFEWLKSFKIASYCKAAVEMQKQYRGTLKNAIQTAIFRQSENINKNKNKNTGNQQQALSENSKDVKSLTADEKKLLKLIENIAKASQKIGESLGLNDKQIKKFNSIYSFAQIQQIAFAERKGNANTCAVCSADNAHRMQQIKITELVEDNKDNIILSAKAQRLPAIPTRIVDGAVKKMATILAKNIVDDNWQNIKQVLSAKHQLHIPIITESNAFEFEPALADVKGKSLKDRRKKALERISPENIFKDKNNRIKEFAKGISAYSGANLTDGDFDGAKEELDHIIPRSHKKYGTLNDEANLICVTRDDNKNIFAIDTSKWFEIETPSDLRDIGVATIQYKIDNNSRPKVRVKLDYVIDDDSKINYFMNHSLLKSRYPDKVLEILKQSTIIEFESSGFNKTIKEMLGMTLAGIYNETSNN

SEQ ID NO: 46 - protein, 1064 aa, Bradyrhizobium sp.
MKRTSLRAYRLGVDLGANSLGWFVVWLDDHGQPEGLGPGGVRIFPDGRNPQSKQSNAAGRRLARSARRRRDRYLQRRGKLMGLLVKHGLMPADEPARKRLECLDPYGLRAKALDEVLPLHHVGRALFHLNQRRGLFANRAIEQGDKDASAIKAAAGRLQTSMQACGARTLGEFLNRRHQLRATVRARSPVGGDVQARYEFYPTRAMVDAEFEAIWAAQAPHHPTMTAEAHDTIREAIFSQRAMKRPSIGKCSLDPATSQDDVDGFRCAWSHPLAQRFRIWQDVRNLAVVETGPTSSRLGKEDQDKVARALLQTDQLSFDEIRGLLGLPSDARFNLESDRRDHLKGDATGAILSARRHFGPAWHDRSLDRQIDIVALLESALDEAAIIASLGTTHSLDEAAAQRALSALLPDGYCRLGLRAIKRVLPLMEAGRTYAEAASAAGYDHALLPGGKLSPTGYLPYYGQWLQNDVVGSDDERDTNERRWGRLPNPTVHIGIGQLRRVVNELIRWHGPPAEITVELTRDLKLSPRRLAELEREQAENQRKNDKRTSLLRKLGLPASTHNLLKLRLWDEQGDVASECPYTGEAIGLERLVSDDVDIDHLIPFSISWDDSAANKVVCMRYANREKGNRTPFEAFGHRQGRPYDWADIAERAARLPRGKRWRFGPGARAQFEELGDFQARLLNETSWLARVAKQYLAAVTHPHRIHVLPGRLTALLRATWELNDLLPGSDDRAAKSRKDHRHHAIDALVAALTDQALLRRMANAHDDTRRKIEVLLPWPTFRIDLETRLKAMLVSHKPDHGLQARLHEDTAYGTVEHPETEDGANLVYRKTFVDISEKEIDRIRDRRLRDLVRAHVAGERQQGKTLKAAVLSFAQRRDIAGHPNGIRHVRLTKSIKPDYLVPIRDKAGRIYKSYNAGENAFVDILQAESGRWIARATTVFQANQANESHDAPAAQPIMRVFKGDMLRIDHAGAEKFVKIVRLSPSNNLLYLVEHHQAGVFQTRHDDPEDSFRWLFASFDKLREWNAELVRIDTLGQPWRRKRGLETGSEDATRIGWTRPKKWP

SEQ ID NO: 47 - protein, 1354 aa, Flavobacterium psychrophilum
MKKILGLDLGTNSIGWAFINEAENEIEVSSIVNTGVRIVPLTTDEESDFKKGNTISINADRTLKRGARRGLQRFKQRREALLETFNRIKFIATDFVYAETGAATTFSSYQLRAKSAVEAVTKEELVKVLLMLNKKRGYKSSRKAKTAEEGDAIDGMKIAKEIFENNLTPGQWVYNSLSKGGKFIPDFYHSDLQKELEKIVRFQNQFHSEQINDKLLADIQGKSRTQTSQHFSKTLNIPLAENKGTREETKLQHYQWRNEALANELDMKILAFIITEINNQINQSSGYLGAISDRSKELYFNQETVGQYQYKQLQENVHAKLKNQVFYRQDYLDEFEKIWETQAKFHSELNEKLKAEIRDITIFYQRKLKSQKHLVSFCEFEKGHKAIPKSSPLFQEFRIWQNLNNVVVKNETTKEVFELSEELKQLIAEELQFKESMTDVQMLTFCELKKGTHTVNFKKIEGNRTNTSIYKAFEKILEVEGYEIDFSKMKPLEIKETVAPIFETLNINTVILDFDPTIQGNDFDKQPYYQLWHLLYSAEDDDKLKETLKTKFGFKENHLPFILNINLQADYGSLSAKAIKKILPHLMDGHIYDKACLMVGYNHSSSLTTAQNNDRVLKDTLELLKKNSLRNPVVEKILNQMINVINAIMKDPAMGKPDEIRVELARELKANNEQRKKATSDINTATTEHERIRKLLHSEFNIPRVTRNDIIRYKLWLETGGISLYTGNPIKASDLFSKNYDIEHIIPKSRLFDDSFSNKTLCERQLNIDKSNKTAYSFLQEKLSENDFAAYENRVKDLFKTGKIKSYTKYKKLLMADNEIPEGFIDRQLRETQYIAKKAKEILLEVSRNVTATIGSVTDKLRQDWELVDVMKELNWEKYDKLGLTHIEEGKNGERLSKIKDWTKRNDHRHHAMDAITVAFTKPAYIQYLNNLNAKTQGENKANSIIGIENKHLYRDKNNKLRFISPMKNFREEAKKQLESILISYKAKNKVVTKNKNTTKKSGGTNQKIQLTPRGRLHKETVYGKLQQYATKEEKVNASFTEDYIQKVAKKEYREALLKRLEENDNDPKKAFTGKNALNKTPIYISLKDNIIVPEKVKTVWLETDYTIRKDITPDLKIDKVIDVGIKRILQNRLNEFNGDPKKAFVNLGESPIWLNKEKGIAIKRVTISGVSNAQALHTKKDHLGNEILDKNGNPIPVDFISTGNNHHVAIYRDEKGNLQEEVVSFYDAVIRRNLGLSVINKNHEKGWEFLFSMKQNEFFIFPSDGFNPHEIDLLNPNNYHLISPNIFRVQKISTKNYMFNHHLETKAVDGEMLKSKKELSKTSYHFIQTPTNLNGIIKVRINHLGKIVHLGEY

SEQ ID NO: 48 - protein, 1062 aa, Actinobacillus succinogenes
MNLNYILGLDLGIASVGWAVVEIDEQENPQRLIDVGVRTFDRAEVLKTGESLALARRLARSSRRLVKRRAERIKKAKRLLKAENLLLSADEILPNEAWQLRVKGLDQKLERQEWAAVLLHLLKHRGYLSQRKNESKSENKELGALLSGVAINHQILQSAEYRTPAEIAVNKFQAEEGHIRNQRGAYTHTFSRLDLLAEMELLFQRQATLGNPHTSTKLLENLTALLMWQKPALAGEAILKMLGKCTFEPTEYKAAKNSYSAERFVWLTKLNNLRILEQGAERALTDNERFALLDQPYEKAKLTYAQVRTLLGLSDEAIFKGLRYQGEDKKAVETKTTLMEVKAYHQIRKALEGLDLKAEWNELKNNPALLDEIGTAFSLYKTDDDIHRYLDGKLSESVLNALLENLNFDKFIQLSLKALQQILPLMLQGQRYDEAVSAIYGDHYGKKSDEIDRLLPNIPTDEIRNPVVLRTLTQARKVINAVVRLYGSPARIHIETGREVGKSYQDRKKLEKQQEENRKQRENAVKKFKEYFPNFVGEPKGKDILKMRLYELQQAKCLYSGKSLELYRLLEKGYVEVDHALPFSRTWDDSFNNKVLVLANENQNKGNATPYEWLDGKNNSEGWQHFVARVQTSGFSYAKKQRVLIQELDEKSFIERNLNDTRYVARFLCNHIADNMLLTGKGKRKVFASNGQITALLRGCWGLQKVRENNDRHHALDAVVVACSTKSMQDKITKFVKYKEGRLFKDKKDGVYKGERINRETGEIISLHFPTPWKFFKENVEIRIFSENPKLELENRLPDYPQYNHEFVQPLFVSRMPTRKMTGQGHMETVKSAKRLDKGLSVLKVPLTQLKLSDLERMVNREREMALYEALKECLEQFGNDPAKAFAEPFYKKGGALVKAVRVEQTQKSGVLVRNGNGVADNATGSIVRVDVFTKGGKYFLVPIYTWQVAKGILPNKAVIQGKDESEWEEMDENAVFQFSMHKNDLIKVKTKKGEIFGYFNGLDRATGSIEIEEHDLEKSKGKNGSHRGLGVKTAFFLEKYQVDELGKNIRPCRPTKRQHVR

SEQ ID NO: 49 - protein, 1340 aa, Dorea longicatena
MEQEYYLGLDMGTGSVGWAVTDSEYHVLRKHGKALWGVRLFESASTAEERRMFRTSRRRLDRRNWRIEILQEIFAEEISKKDPGFFLRMKESKYYPEDKRDINGNCPELPYALFVDDDFTDKDYHKKFPTIYHLRKMLMNTEETPDIRLVYLAIHHMMKHRGHFLLSGDINEIKEFGTTFSKLLENIKNEELDWNLELGKEEYAVVESILKDNMLNRSTKKTRLIKALKAKSICEKAVLNLLAGGTVKLSDIFGLEELNETERPKISFADNGYDDYIGEVENELGEQFYIIETAKAVYDWAVLVEILGKYTSISEAKVATYEKHKSDLQFLKKIVRKYLTKEEYKDIFVSTSDKLKNYSAYIGMTKINGKKVDLQSKRCSKEEFYDFIKKNVLKKLEGQPEYEYLKEELERETFLPKQVNRDNGVIPYQIHLYELKKILGNLRDKIDLIKENEDKLVQLFEFRIPYYVGPLNKIDDGKEGKFTWAVRKSNEKIYPWNFENVVDIEASAEKFIRRMTNKCTYLMGEDVLPKDSLLYSKYMVLNELNNVKLDGEKLSVELKQRLYTDVFCKYRKVTVKKIKNYLKCEGIISGNVEITGIDGDFKASLTAYHDFKEILTGTELAKKDKENIITNIVLFGDDKKLLKKRLNRLYPQITPNQLKKICALSYTGWGRFSKKFLEEITAPDPETGEVWNIITALWESNNNLMQLLSNEYRFMEEVETYNMGKQTKTLSYETVENMYVSPSVKRQIWQTLKIVKELEKVMKESPKRVFIEMAREKQESKRTESRKKQLIDLYKACKNEEKDWVKELGDQEEQKLRSDKLYLYYTQKGRCMYSGEVIELKDLWDNTKYDIDHIYPQSKTMDDSLNNRVLVKKKYNATKSDKYPLNENIRHERKGFWKSLLDGGFISKEKYERLIRNTELSPEELAGFIERQIVETRQSTKAVAEILKQVFPESEIVYVKAGTVSRFRKDFELLKVREVNDLHHAKDAYLNIVVGNSYYVKFTKNASWFIKENPGRTYNLKKMFTSGWNIERNGEVAWEVGKKGTIVTVKQIMNKNNILVTRQVHEAKGGLFDQQIMKKGKGQIAIKETDERLASIEKYGGYNKAAGAYFMLVESKDKKGKTIRTIEFIPLYLKNKIESDESIALNFLEKGRGLKEPKILLKKIKIDTLFDVDGFKMWLSGRTGDRLLFKCANQLILDEKIIVTMKKIVKFIQRRQENRELKLSDKDGIDNEVLMEIYNTFVDKLENTVYRIRLSEQAKTLIDKQKEFERLSLEDKSSTLFEILHIFQCQSSAANLKMIGGPGKAGILVMNNNISKCNKISIINQSPTGIFENEIDLLKI

SEQ ID NO: 50 - protein, 984 aa, Campylobacter jejuni
MAKILAFDIGISSIGWAFSENDELKDCGVRIFTKAENPKTGESLALPRRIARSARKRLARRKARLNHLKHLIANEFKLNYEDYQSFDEILAKAYKGSLISPYELRFRALNELLSKQDFARVILHIAKRRGYDDIKNNGDEEKGKILKAIKQNEEKLANYQSVGEYLYKEYFQKFKENSKEFINVRNKKESYERCIAQSFLKDELKLIFKKQREFGFSFSKKFEEEVLSVAFYKRALKDFSHLVGNCSFFTDEKRAPKNSPLAFMFVALTRIINLLNNLKNTLYTKDDLNALLNEVLKNGTLTYKQTKKLLGLSDDYEFKGEKGNYFIEFKKYKEFIKALGEHSLSQDDLNEIAKDITLIKDEIKLKKALAKYDLNENQIDNLSKLEFKDHLNISFKALKLITPLMLEGKKYDEACNELTLKVAINEDKKDFLPAFNETYYKDEVTNPVVLRAIKEYRKVLNALLKKYGKVHKINIELAREVGKNHSQRAKIEKEQNENYKAKKDAELECEKLGLKINSKNILKLRLFKEQKEFCVYSGEKIKLSDLQDEKMLEIDHIYPYSRSFDDSYMNKVLVFTKQNQEKLNQTPFEAFGNDSAKWQKIEVLAKNLPTKKQKRILDKNYKDKEQKDFKDRNLNDTRYIARLVLNYTKDYLDFLPLSDDENTKLNDTQKGSKVHVEAKSGMLTSALRHTWGFSTKDRNNHLHHAIDAVIIAYANNSIVKAFSDFKKEQESNTAELYAKKISELDYKNKRKFFEPFSGFRQKVLDKIDEIFVSKPERKKPSGALHEETFRKEEEFYQSYGGKEGVLKALELGKIRKVNGKIVKNGDMFRVDIFKHKKTNKFYAVPIYTMDFALKVLPNKAVARSKKGEIKDWILMDENYEFCFSLYKDSLILIQTKDMQEPEFVYYNAFTSSTVSLIVSKHDNKFETLSKNQKILFKNANEKEVIAKSIGIQNLKVFEKYIVSALGEVTKAEFRQREEFKNELR

SEQ ID NO: 51 - protein, 1037 aa, Parvibaculum lavamentivorans
MERIFGFDIGTTSIGFSVIDYSSTQSAGNIQRLGVRIFPEARDPDGTPLNQQRRQKRMMRRQLRRRRIRRKALNETLHEAGFLPAYGSADWPVVMADEPYELRRRGLEEGLSAYEFGRAIYHLAQHRHFKGRELEESDTPDPDVDDEKEAANERAATLKALKNEQTTLGAWLARRPPSDRKRGIHAHRNVVAEEFERLWEVQSKFHPALKSEEMRARISDTIFAQRPVFWRKNTLGECRFMPGEPLCPKGSWLSQQRRMLEKLNNLAIAGGNARPLDAEERDAILSKLQQQASMSWPGVRSALKALYKQRGEPGAEKSLKFNLELGGESKLLGNALEAKLADMFGPDWPAHPRKQEIRHAVHERLWAADYGETPDKKRVIILSEKDRKAHREAAANSFVADFGITGEQAAQLQALKLPTGWEPYSIPALNLFLAELEKGERFGALVNGPDWEGWRRTNFPHRNQPTGEILDKLPSPASKEERERISQLRNPTVVRTQNELRKVVNNLIGLYGKPDRIRIEVGRDVGKSKREREEIQSGIRRNEKQRKKATEDLIKNGIANPSRDDVEKWILWKEGQERCPYTGDQIGFNALFREGRYEVEHIWPRSRSFDNSPRNKTLCRKDVNIEKGNRMPFEAFGHDEDRWSAIQIRLQGMVSAKGGTGMSPGKVKRFLAKTMPEDFAARQLNDTRYAAKQILAQLKRLWPDMGPEAPVKVEAVTGQVTAQLRKLWTLNNILADDGEKTRADHRHHAIDALTVACTHPGMTNKLSRYWQLRDDPRAEKPALTPPWDTIRADAEKAVSEIVVSHRVRKKVSGPLHKETTYGDTGTDIKTKSGTYRQFVTRKKIESLSKGELDEIRDPRIKEIVAAHVAGRGGDPKKAFPPYPCVSPGGPEIRKVRLTSKQQLNLMAQTGNGYADLGSNHHIAIYRLPDGKADFEIVSLFDASRRLAQRNPIVQRTRADGASFVMSLAAGEAIMIPEGSKKGIWIVQGVWASGQVVLERDTDADHSTTTRPMPNPILKDDAKKVSIDPIGRVRPSND

SEQ ID NO: 52 - protein, 1107 aa, Eubacterium ventriosum
MGYTVGLDIGVASVGVAVLDENDNIVEAVSNIFDEADTSNNKVRRTLREGRRTKRRQKTRIEDFKQLWETSGYIIPHKLHLNIIELRNKGLTELLSLDELYCVLLSMLKHRGISYLEDADDGEKGNAYKKGLAFNEKQLKEKMPCEIQLERMKKYGKYHGEFIIEINDEKEYQSNVFTTKAYKKELEKIFETQRCNGNKINTKFIKKYMEIYERKREYYIGPGNEKSRTDYGIYTTRTDEEGNFIDEKNIFGKLIGKCSVYPEEYRASSASYTAQEFNLLNDLNNLKINNEKLTEFQKKEIVEIIKDASSVNMRKIIKKVIDEDIEQYSGARIDKKGKEIYHTFEIYRKLKKELKTINVDIDSFTREELDKTMDILTLNTERESIVKAFDEQKFVYEENLIKKLIEFRKNNQRLFSGWHSFSYKAMLQLIPVMYKEPKEQMQLLTEMNVFKSKKEKYVNYKYIPENEVVKEIYNPVVVKSIRTTVKILNALIKKYGYPESVVIEMPRDKNSDDEKEKIDMNQKKNQEEYEKILNKIYDEKGIEITNKDYKKQKKLVLKLKLWNEQEGLCLYSGKKIAIEDLLNHPEFFEIDHIIPKSISLDDSRSNKVLVYKTENSIKENDTPYHYLTRINGKWGFDEYKANVLELRRRGKIDDKKVNNLLCMEDITKIDVVKGFINRNLNDTRYASRVVLNEMQSFFESRKYCNTKVKVIRGSLTYQMRQDLHLKKNREESYSHHAVDAMLIAFSQKGYEAYRKIQKDCYDFETGEILDKEKWNKYIDDDEFDDILYKERMNEIRKKIIEAEEKVKYNYKIDKKCNRGLCNQTIYGTREKDGKIHKISSYNIYDDKECNSLKKMINSGKGSDLLMYNNDPKTYRDMLKILETYSSEKNPFVAYNKETGDYFRKYSKNHNGPKVEKVKYYSGQINSCIDISHKYGHAKNSKKVVLVSLNPYRTDVYYDNDTGKYYLVGVKYNHIKCVGNKYVIDSETYNELLRKEGVLNSDENLEDLNSKNITYKFSLYKNDIIQYEKGGEYYTERFLSRIKEQKNLIETKPINKPNFQRKNKKGEWENTRNQIALAKTKYVGKLVTDVLGNCYIVNMEKFSLVVDK

SEQ ID NO: 53 - protein, 1136 aa, Streptococcus gordonii
MNGLVLGLDIGIASVGVGILEKDTGKIIHASSRLFPAATADNNVERRSNRQGRRLNRRKKHRSVRLQDLFEGYGLLTDFSKVSMNLNPYQLRVQGMENQLTNEELFVALKNIVKRRGISYLDDASEDGGTVSSDYGKAVEENRKLLAEKTPGQIQLERFEKYGQLRGDFTVEENGEKHRLINVFSTSAYRKEAERILRKQQEFNSKITDEFIEDYLIILTGKRKYYHGPGNEKSRTDYGRFRTDGTTLDNIFGILIGKCTFYTEEYRASKASYTAQEFNLLNDLNNLTVPTETKKLSEEQKKLIIEYAKSAKTLGASTLLKYIAKMIDASVDQIRGYRVDVNNKPEMHTFEVYRKMQSLETIKVEELPRKVLDELAHILTLNTEREGIEEAINSKLKDIFNRDQVLELVQFRKNNSSLFSKGWHNFSIKLMMELIPELYETSEEQMTILTRLGKQRSKETSKRTKYIDEKELTEEIYNPVVAKSVRQAIKIINEATKKYGIFDNIVIEMARENNEEDAKKDYIKRQKANQDEKNAAMEKAAFQYNGKKELPDNIFHGHKELTTKIRLWHQQGEKCLYTGKNIPISDLIHNQYKYEIDHILPLSLSFDDSLSNKVLVLATANQEKGQRTPFQALDSMDDAWSYREFKSYVKDSKLLSNKKKDYLLTEEDISKIEVKQKFIERNLVDTRYSSRVVLNALQDFYKSHQLDTTISVVRGQFTSQLRRKWGIEKSRETYHHHAVDALIIAASSQLRLWKKHSNPLIAYKEGQFVDSETGEIVSLSDEEYKELVFKAPYDHFVDTLRSKKFEDSILFSYQVDSKYNRKISDATIYATRKAKLDKEKKEYTYTLGKIKDIYALGTKTPSKTGFYKFLDLYKTDKSQFLMYQKDRKTWDEVIEKIIEQYRPFKEYDKNGKEVDFNPFEKYRIGNGPIRKYSKKGNGPEIKSLKYYDILLGKHKNITPDGSRNTVALLSLNPWRTDVYYNSETKKYEFLGLKYADLCFEEGGAYGISEVKYKKIREKEGIGKNSEFKFTLYKNDLILIKDTETNCQQFFRFWSRTGKDNPKSFEKHKIELKPYEKAKFEKGEELKVLGKVPPSSNQFQKNMQIENLSIYKVKTDILGNKHFIKKEGDEPKLKFKK

SEQ ID NO: 54 - protein, 984 aa, Campylobacter jejuni
MARILAFDIGISSIGWAFSENDELKDCGVRIFTKAENPKTGESLALPRRLARSARKRLARRKARLNHLKHLIANEFKLNYEDYQSFDESLAKAYKGSLISPYELRFRALNELLSKQDFARVILHIAKRRGYDDIKNNGDEEKSEILKAIKQNEEKLVNYQSVGEYLYKEYFQKFKENSKEFINVRNKKESYERCITQSFLKDELKLIFQKQREFGFSFSKKFEEEVLSVAFYKRALKDFSHLVGNCSFFTDEKRAPKNSPLAFMFVALTRIINILNNLKNTEGILYTKDDLNALLNEVLKNGTLTYKQTKKLLGLSDDYEFKGEKGTYFIEFKKYKEFIKALGEHNLSQDDLNEIAKDITLIKDEIKLKKALAKYDLNQNQIDSLSKLEFKDHLNISFKALKLITPLMLEGKKYDEACNELNLKVAINEDKKDFLPAFNETYYKDEVTNPVVLRAIKEYRKILNALLKKYGKVHKINIELAREVGKNHSQRAKIEKEQNENYKAKKDAEIECEKLGLKINSKNILKLRLFKEQKEFCAYSGEKIKLSDLQDEKMLEIDHIYPYSRSFDDSYMNKVLVFTKQNQEKLNKTPFEAFGNDSTKWQKIEVLAKNLPEKKQKRILDKNYKDKEQKDFKDRNLNDTRYIARLVLNYTKDYLDFLPLSDDENTKLNDTQKGSKVHVEAKSGMLTSALRHTWGFSAKDRNNHLHHAIDAAIIAYANNSIVKAFSDFKKEQESNSVELYAKKISELDYKNKRKFFEPFSGFRQKVLDKIDEIFVSKPERKKPSGALHEETFRKEEEFYQSYGGKEGVLKALELGKIRKVNGKIVKNGDMFRVDIFKHKKTNKFYAVPIYTMDFALKVLPNKAVARSKKGEIKDWILMDENYEFCFSLYKDSLILIQTKDMQEPELVYFNAFTSSTVSLIVSKHDNKFETLSKNQKILFKNANEKEVIAKSIGIQNLKVFEKYIVSALGEVTKAEFRQREDFKK

SEQ ID NO: 55 - protein, 1079 aa, Dinoroseobacter shibae
MRLGLDIGTSSIGWWLYETDGAGSDARITGVVDGGVRIFSDGRDPKSGASLAVDRRAARAMRRRRDRYLRRRATLMKVLAETGLMPADPAEAKALEALDPFALRAAGLDEPLPLPHLGRALFHLNQRRGFKSNRKTDRGDNESGKIKDATARLDMEMMANGARTYGEFLHKRRQKATDPRHVPSVRTRLSIANRGGPDGKEEAGYDFYPDRRHLEEEFHKLWAAQGAHHPELTETLRDLLFEKIFFQRPLKEPEVGLCLFSGHHGVPPKDPRLPKAHPLTQRRVLYETVNQLRVTADGREARPLTREERDQVIHALDNKKPTKSLSSMVLKLPALAKVLKLRDGERFTLETGVRDAIACDPLRASPAHPDRFGPRWSILDADAQWEVISRIRRVQSDAEHAALVDWLTEAHGLDRAHAEATAHAPLPDGYGRLGLTATTRILYQLTADVVTYADAVKACGWHHSDGRTGECFDRLPYYGEVLERHVIPGSYHPDDDDITRFGRITNPTVHIGLNQLRRLVNRIIETHGKPHQIVVELARDLKKSEEQKRADIKRIRDTTEAAKKRSEKLEELEIEDNGRNRMLLRLWEDLNPDDAMRRFCPYTGTRISAAMIFDGSCDVDHILPYSRTLDDSFPNRTLCLREANRQKRNQTPWQAWGDTPHWHAIAANLKNLPENKRWRFAPDAMTRFEGENGFLDRALKDTQYLARISRSYLDTLFTKGGHVWVVPGRFTEMLRRHWGLNSLLSDAGRGAVKAKNRTDHRHHAIDAAVIAATDPGLLNRISRAAGQGEAAGQSAELIARDTPPPWEGFRDDLRVRLDRIIVSHRADHGRIDHAARKQGRDSTAGQLHQETAYSIVDDIHVASRTDLLSLKPAQLLDEPGRSGQVRDPQLRKALRVATGGKTGKDFENALRYFASKPGPYQAIRRVRIIKPLQAQARVPVPAQDPIKAYQGGSNHLFEIWRLPDGEIEAQVITSFEAHTLEGEKRPHPAAKRLLRVHKGDMVALERDGRRVVGHVQKMDIANGLFIVPHNEANADTRNNDKSDPFKWIQIGARPAIASGIRRVSVDEIGRLRDGGTRPI

SEQ ID NO: 56 - protein, 1096 aa, Eubacterium dolichum
MMEVFMGRLVLGLDIGITSVGFGIIDLDESEIVDYGVRLFKEGTAAENETRRTKRGGRRLKRRRVTRREDMLHLLKQAGIISTSFHPLNNPYDVRVKGLNERLNGEELATALLHLCKHRGSSVETIEDDEAKAKEAGETKKVLSMNDQLLKSGKYVCEIQKERLRTNGHIRGHENNFKTRAYVDEAFQILSHQDLSNELKSAIITIISRKRMYYDGPGGPLSPTPYGRYTYFGQKEPIDLIEKMRGKCSLFPNEPRAPKLAYSAELFNLLNDLNNLSIEGEKLTSEQKAMILKIVHEKGKITPKQLAKEVGVSLEQIRGFRIDTKGSPLLSELTGYKMIREVLEKSNDEHLEDHVFYDEIAEILTKTKDIEGRKKQISELSSDLNEESVHQLAGLTKFTAYHSLSFKALRLINEEMLKTELNQMQSITLFGLKQNNELSVKGMKNIQADDTAILSPVAKRAQRETFKVVNRLREIYGEFDSIVVEMAREKNSEEQRKAIRERQKFFEMRNKQVADIIGDDRKINAKLREKLVLYQEQDGKTAYSLEPIDLKLLIDDPNAYEVDHIIPISISLDDSITNKVLVTHRENQEKGNLTPISAFVKGRFTKGSLAQYKAYCLKLKEKNIKTNKGYRKKVEQYLLNENDIYKYDIQKEFINRNLVDTSYASRVVLNTLTTYFKQNEIPTKVFTVKGSLTNAFRRKINLKKDRDEDYGHHAIDALIIASMPKMRLLSTIFSRYKIEDIYDESTGEVFSSGDDSMYYDDRYFAFIASLKAIKVRKFSHKIDTKPNRSVADETIYSTRVIDGKEKVVKKYKDIYDPKFTALAEDILNNAYQEKYLMALHDPQTFDQIVKVVNYYFEEMSKSEKYFTKDKKGRIKISGMNPLSLYRDEHGMLKKYSKKGDGPAITQMKYFDGVLGNHIDISAHYQVRDKKVVLQQISPYRTDFYYSKENGYKFVTIRYKDVRWSEKKKKYVIDQQDYAMKKAEKKIDDTYEFQFSMHRDELIGITKAEGEALIYPDETWHNFNFFFHAGETPEILKFTATNNDKSNKIEVKPIHCYCKMRLMPTISKKIVRIDKYATDVVGNLYKVKKNTLKFEFD

SEQ ID NO: 57 - protein, 1082 aa, Neisseria meningitidis
MAAFKPNPINYILGLDIGIASVGWAMVEIDEDENPICLIDLGVRVFERAEVPKTGDSLAMARRLARSVRRLTRRRAHRLLRARRLLKREGVLQAADFDENGLIKSLPNTPWQLRAAALDRKLTPLEWSAVLLHLIKHRGYLSQRKNEGETADKELGALLKGVADNAHALQTGDFRTPAELALNKFEKESGHIRNQRGDYSHTFSRKDLQAELNLLFEKQKEFGNPHISDGLKEGIETLLMTQRPALSGDAVQKMLGHCTFEPAEPKAAKNTYTAERFIWLTKLNNLRILEQGSERPLTDTERTTLIDEPYRKSKLTYAQARKLLELDNTAFFKGLRYGKDNAEASTLMEMKAYHAISRALEKEGLKDKKSPLNLSPELQDEIGTAFSLFKTDEDITGRLKDRVQPEILEALLKHISFDKFVQISLKALRRIVPLMEQGKRYDEACAEIYGDHYGKKNTEEKIDLPPIPADEIRNPVVLRALSQARKVINGVVRRYGSPARIHIETAREVGKSFKDRKEIEKRQEENRKDREKAATKFREYFPNFVGEPKSKDILKLRLYEQQHGKCLYSGKEINLGRLNEKGYVEIDHALPFSRTWDDSFNNKVLVLGSENQNKGNQTPYEYFNGKDNSREWQEFKARVETSRFPRSKKQRILLQKFDEEGFKERNLNDTRYVNRFLCQFVADHMLLTGKGKRRVFASNGQITNLLRGFWGLRKVRAENDRHHALDAVVVACSTVAMQQKITRFVRYKEMNAFDGKTIDKETGEVLHQKTHFPQPWEFFAQEVMIRVFGKPDGKPEFEEADTPEKLRTLLAEKLSSRPEAVHEYVTPLFVSRAPNRKMSGQGHMETVKSAKRLDEGVSVLRVPLTQLKLKDLEKMVNREREPKLYEALKARLEAHKDDPAKAFAEPFYKYDKAGNRTQQVKAVRVEQVQKTGVWVRNHNGIADNATMVRVDVFEKGDKYYLVPIYSWQVAKGILPDRAVVQGKDEEDWQLIDDSFNFKFSLHPNDLVEVITKKARMFGYFASCHRGTGNINIRIHDLDHKIGKNGILEGIGVKTALSFQKYQIDELGKEIRPCRLKKRPPVR

SEQ ID NO: 58 - protein, 1050 aa, Gluconacetobacter diazotrophicus
MGENMIDESLTFGIDLGIGSCGWAVLRRPSAFGRKGVIEGMGSWCFDVPETSKERTPTNQIRRSNRLLRRVIRRRRNRMAAIRRLLHAAGLLPSTDSDALKRPGHDPWELRARGLDKPLKPVEFAVVLGHIAKRRGFKSAAKRKATNISSDDKKMLTALEATRERLGRYRTVGEMFARDPDFASRRRNREGKYDRTTARDDLEHEVHALFAAQRRLGQGFASPELEEAFTASAFHQRPMQDSERLVGFCPFERTEKRAAKLTPSFERFRLLARLLNLRITTPDGERPLTVDEIALVTRDLGKTAKLSIKRVRTLIGLEDNQRFTTIRPEDEDRDIVARTGGAMTGTATLRKALGEALWTDMQERPEQLDAIVQVLSFFEANETITEKLREIGLTLAVLDVLLTALDAGVFAKFKGAAHISTKAARNLLPHLEQGRRYDEACTMAGYDHAASRLSHHGQIVAKTQFNALVTEIGESIANPIARKALIEGLKQIWAMRNHWGLPGSIHVELARDVGNSIEKRREIEKHIEKNTALRARERREVHDLLDLEDVNGDTLLRYRLWKEQGGKCLYTGKAIHIRQIAATDNSVQVDHILPWSRFGDDSFNNKTLCLASANQQKKRSTPYEWLSGQTGDAWNAFVQRIETNKELRGFKKRNYLLKNAKEAEEKFRSRNLNDTRYAARLFAEAVKLLYAFGERQEKGGNRRVFTRPGALTAALRQAWGVESLKKQDGKRINDDRHHALDALTVAAVDEAEIQRLTKSFHEWEQQGLGRPLRRVEPPWESFRADVEATYPEVFVARPERRRARGEGHAATIRQVKERECTPIVFERKAVSSLKEADLERIKDGERNEAIVEAIRSWIATGRPADAPPRSPRGDIITKIRLATTIKAAVPVRGGTAGRGEMVRADVFSKPNRRGKDEWYLVPVYPHQIMNRKAWPKPPMRSIVANKDEDEWTEVGPEHQFRFSLYPRSNIEIIRPSGEVIEGYFVGLHRNTGALTISAHNDPKSIHSGIGTKTLLAISKYQVDRFGRKSPVRKEVRTWHGEACISPTPPG

SEQ ID NO: 59 - protein, 1391 aa, Kordia algicida
MKKILGLDLGTNSIGWALVNEAEHEHEQSSIVKLGVRVNPLSVDEKTNFEKGRPLSINADRTSKRSARRNLQRFKLRRKNLINLLLKHHIISNETILTEVGKNTTHQTLKLRSKATQEKISLEEFARILLSINKKRGYKSSRKEKNEDEGFTIDGMAIAKELYDNQLTPGQYVYNILQDGKNYIPDFYRSDLQAEFDDVWQFQKKFYSSILTDEFYLKLKGQGKENTRKLFLAIHQVYTAENKGKRDAVKLQYYKWRSEAVKKQLSIEEVAYVLVEINNNINKSSGYLGAISDRSKALYFNNETVGEYLYGQLVKNRHNSLRNQVFYRQDYLDEFEKIWETQAKFYDELTNELKQEIRDVVIFYQRKLKSQKHLISDCLFEKHHKAIPKSSPLFQEFKIWQNLNYLEFVHTQSKEKIFFSELDDETRQFVFAELNIRGTLKIKEIKKLIGLETPVYWKSNFDEIEGNRTNQVLYNVYQNIADDLGYGFDWSKKHAFEINAELQAIFKDVGIDTAILNFDASIEENDFDKQKSYQLWHLLYSAEDTDKATEEDKLIYGNINTKLKKQLHQKYGFEAKYGNLLANISLQQDYGNLSAKAIKKILPYLESGNSFYEACTIVGYNPSNSLTKEQQQNRKLKDKLELLPKNSLRNPVVEKILNQKVNLINQLIDEYGKPDEVRIELARELKKSAKQRADLSKHINDATLKNQNIRKTLQKDFGIQNPSKNDVIRYKLYDELKDNGYKTLFTNKYIPKEQLFSKDVDIEHIIPKAILFDDSFSNKTLAYRNVNLAKADATAFDFISSKHLDDLDNYKARVETLFQSKRISKGKYKKLLMTRQNLPEDFIERDLRNSQYIAKKATAMLKEVFRSVVPTSGRITDKLREDWDLVNVMKELNLPKYRTLGLTEFIERKNGNKIEQIIDWTKRNDHRHHAMDALTVAFTTHNHIQYLNNLNVTHGLNGVDTDHEKSRLYAIKQAITKVYIVGKTKKRKFIPPMENFRSHAKNHLEGILISFKNKNKVVTKNKNRTKTKTKGVFNEKIQLTPRGQLHKETIYGHAKKVIVTKEKVSSKFTHEKILQVTKPAYREALLKRLASFKNDPKKAFSGKNALSKNPLYFDITSGKKVPDTVKLSYFENSYVIRKEVNSDNFKNEKSLQKVLDVGIRRILEKRLADYNGNAKEAFSNLEKNPIWKDKEKGVCIKKVRIEALKNAEPLHVKKDHLGKIILDDENKSTPVDFISTGNNHHVAIYEDKDGKLHDKVVSFYEVVSRVNLGLPIIDKSFNSHLDWKFLFSMKQNEMFVFPSEDFNPKEIDIGNPKNNELISKYLFRVQKFSKVTYGNSAVRDYVFRHHLETELIDKKELKGITYYQLKSIGMLEKLVKVRINHIGKIVHIGEY

SEQ ID NO: 60 - protein, 1116 aa, Clostridium spiroforme
MVEFLLKEMKIMGRLVLGLDIGITSVGYGVIDIDKNEFVDYGVRLFKEGTAINNEERRSKRGARRLKRRKTNRIADMKKLLERNGLIDEQYTALNNPYEIRKKGLKNKLSNYELATAILHITKNRGTCLESNADETQDEESTKNILSKNALELKDKYICEIQLARLEESGKIRGINNNFKTEDYLKELSKILENQDLEKETIDKIKEIVARRRRYDQGPGSEKSPTPYGSYRMENGELVHVNLIDMMRGKCSVFPDQLRAPQQSYSAELFNLLNDLNNLKINGEKLSSTEKQKIIDFVNEKGGITVKQLLKLIDVGITEISGFRIDKNEKPLITEFKGYKKVLKVFKNYNQESLLNDKSIVDTIMDINTKIKSIDERSDQLKQVLPSLDTSIINDLASIKGVSGYHSLSLKALNLINNEMLKTEMNQMQVLHQLDIFDKNRVSLKGQRQIYADDNAILSPVAKRAHRETFKVINKLRSIYGEFDSIVIETTRDKNTQDQKKRIKNNQKNYEERNTEVNNFLKEAGYNPENINAKTKMKIRLYIEQDAKSAYTLQDINLKELIEDEKAYEIDHIIPISISLDDSFNNKVLTTHDENQEKGNLTPISAFLKGKFHNGNLNTYKVFIQNNKNLNRKKKEYLLCEDDITRYEVVQNFINRNLVDTSYACRTVMNTLVHYFKDNEINTKVHTIKGQATSTFRKRIGLIKDREEDYFHHAIDALIVASLKKMNLINSYLMKVDFNEMYDEETGEIFNVLPDNSYLDEKYISFVSNLKNIYEESNKYIRGVMIKEKMTYPLIKVSHKIDTKPNRKISDDTIYSTRNVDNQDMLVERIKNIYDPKENAANTLINDIINDNTDKYIMYHKDPQTFDKIKAIVLNHFNEFKTDKNCYIVTKEGLYKLKGTSPLALYYEEFGPITKYAKKNNGPTIHSMKFYSEKLGNHLSITHKYSTVNKKVITKQISPYRTDFYQSPEGKYKFVTVRYKDVAYNAKKDKYIIDHSWYREQKKLKKIADEWIFVCSVHRDELIGIMKADGQKRIFDSSTESDGETLYHDAKTYEILKFTATNNDITGRFEVKPIYCYCKKQLMVSIGTCRKIQKFATDVLGNLYIVKDNVLKLEFK

SEQ ID NO: 61 - protein, 1348 aa, Finegoldia magna
MKSEKKYYIGLDVGTNSVGWAVTDEFYNILRAKGKDLWGVRLFEKADTAANTRIFRSGRRRNDRKGMRLQILREIFEDEIKKVDKDFYDRLDESKFWAEDKKVSGKYSLFNDKNFSDKQYFEKFPTIFHLRKYLMEEHGKVDIRYYFLAINQMMKRRGHFLIDGQISHVTDDKPLKEQLILLINDLLKIELEEELMDSIFEILADVNEKRTDKKNNLKELIKGQDFNKQEGNILNSIFESIVTGKAKIKNIISDEDILEKIKEDNKEDFVLTGDSYEENLQYFEEVLQENITLFNTLKSTYDFLILQSILKGKSTLSDAQVERYDEHKKDLEILKKVIKKYDEDGKLFKQVFKEDNGNGYVSYIGYYLNKNKKITAKKKISNIEFTKYVKGILEKQCDCEDEDVKYLLGKIEQENFLLKQISSINSVIPHQIHLFELDKILENLAKNYPSFNNKKEEFTKIEKIRKTFTFRIPYYVGPLNDYHKNNGGNAWIFRNKGEKIRPWNFEKIVDLHKSEEEFIKRMLNQCTYLPEETVLPKSSILYSEYMVLNELNNLRINGKPLDTDVKLKLIEELFKKKTKVTLKSIRDYMVRNNFADKEDFDNSEKNLEIASNMKSYIDFNNILEDKFDVEMVEDLIEKITIHTGNKKLLKKYIEETYPDLSSSQIQKIINLKYKDWGRLSRKLLDGIKGTKKETEKTDTVINFLRNSSDNLMQIIGSQNYSFNEYIDKLRKKYIPQEISYEVVENLYVSPSVKKMIWQVIRVTEEITKVMGYDPDKIFIEMAKSEEEKKTTISRKNKLLDLYKAIKKDERDSQYEKLLTGLNKLDDSDLRSRKLYLYYTQMGRDMYTGEKIDLDKLFDSTHYDKDHIIPQSMKKDDSIINNLVLVNKNANQTTKGNIYPVPSSIRNNPKIYNYWKYLMEKEFISKEKYNRLIRNTPLTNEELGGFINRQLVETRQSTKAIKELFEKFYQKSKIIPVKASLASDLRKDMNTLKSREVNDLHHAHDAFLNIVAGDVWNREFTSNPINYVKENREGDKVKYSLSKDFTRPRKSKGKVIWTPEKGRKLIVDTLNKPSVLISNESHVKKGELFNATIAGKKDYKKGKIYLPLKKDDRLQDVSKYGGYKAINGAFFFLVEHTKSKKRIRSIELFPLHLLSKFYEDKNTVLDYAINVLQLQDPKIIIDKINYRTEIIIDNFSYLISTKSNDGSITVKPNEQMYWRVDEISNLKKIENKYKKDAILTEEDRKIMESYIDKIYQQFKAGKYKNRRTTDTIIEKYEIIDLDTLDNKQLYQLLVAFISLSYKTSNNAVDFTVIGLGTECGKPRITNLPDNTYLVYKSITGIYEKRIRIK

SEQ ID NO: 62 - protein, 1129 aa, Streptococcus infantarius
MSNGKILGLDIGVASVGVGIIDSKTGNVIHANSRLFSAANAENNAERRGFRGARRLTRRKKHRVKRVRDLFEKYDISTDFRNLNLNPYELRVKGLTEQLTNEELFAALRTIAKRRGISYLDDAEDDSTGSSDYAKSIDENRRLLKTKTPGQIQLERLEKYGQLRGNFTVYDENGEAHRLINVFSTSDYKNEARKILETQSNYNKQITDEFIEDYIEILTQKRKYYHGPGNEKSRTDYGRFRTDGTTLENIFGILIGKCSFYPEEYRASKASYTAQEFNFLNDLNNLKVPTETGKLSTEQKEYLVDFAKKSKALGASKLLKEIAKIVDCSVDDIKGYRVDNKDKPDLHTFEPYRKLKFNLSSIDIDELSRETLDKLADILTLNTEREGIEDAIKRNLPSQFTEEQISEIVQIRKNQSSAFNKGWHSFSAKLMNELIPELYVTSEEQMTILTRLEKFKVNKKSSKNTKTIDEKEITDEIYNPVVAKSVRQTIKIINAAVKKYGDFDKIVIEMPRDKNAEDEKKFIDKKQKENKKEKDDSLKRAAFLYNGTDNLPDGVFHGNKELKTKIRLWYQQGERCLYSGKLISIHDLVHNSNKFEIDHILPLSLSFDDSLANKVLVYAWTNQEKGQKTPYQVIDSMDTAWSFREMKDYVLKQKGLGKKKCEYLLTTENIDKIEVKKKFIERNLVDTRYASRVVLNSLQTALKELGKDTKVSVVRGQFTSQLRRKWNIDKSRETYHHHAVDALIIAASSQLKLWQKQENPMFESYGENQVVNKETGEILSISDDKYKELVFQPPYQGFVNTISSKGFEDEILFSYQVDSKFNRKVSDATIYSTRKAKLGKDKKDETYVLGKIKDIYSQDGFDTFIKRYKKDKTQFLMYQKDPLTWENVIEVILRDYPSEKLSEDGKKTVKCNPFEEYRRENGLICKYSKKGNGTPIKSLKYYDKKLGNCIDITPEKSKNRVVLRQISPWRADIYFNLETLKYELMGLKYSDLSFEKGTGKYHISQEKYDAIREKEGIGKKSEFKFTLYRNDLILIKDTLNNCERMLRFGSKNDTSKHYVELKPLEKGTFDSEEEILPVLGKVAKSGQFIKGLNKPNISIYKVRTDVLGNKFFIKKEGDKPKLDFKNNNK

SEQ ID NO: 63 - protein, 1065 aa, Clostridium perfringens
MNKDINYALGLDIGITSVGWAVINLDLNRIEDLGVRIFNAAENLKDGSSLALPRRLARGRRRLLRRKAYRVERVRKLILKNNILTKEELEGLFKNKEVIDVWEARVKGLDYKLSREEWAKILINFCKRRGFKSNRKNEAKDKEAGQILSSISYNIEKMKETNSRTIGEYIYNEVKNSEDSYAPLRNKFGEYKMCVSRDVIREEIHTLFEKQRELGNNFASDEIEDKYFEIFNSQRPFSNFEDLEKLVGFCTFERKKHKRAPKHCISSEEFTLYEGINKLSIIKDGEKRKLSEEERTLVVNEAFNKKEIKYTTLRKLLGLSEEELFSTLTYSIDKDISKTENTKFVSLKGYHEIKRAIEKGVSKKAWQDIENNRNLLNDIAYVLTLGKTDDEIEKQLRLRNVPEELFESLLDMSFNKFNNLSIYALEKILPFMKEGYQYNEACEKAGYNFKAIYEGVRTKKLPVIEIDEIVNPVVNRALAQTRKVINSVIDKYGSPVRINIELARDLAKNFKDRKLIEKEQKENRANLDKIRENLRELMDKEPTVVEVLKYRLWEQQRGECAYTQSQIPLERLFSPGYCEIDHIIPFSRSFDDSLSNKILVLGSENQRKGNRTPYEYFGEDSERWNSFEIWVKGSYLNYKKKANLLKKKFSEEEQRDWKARNLQDTKYICRYISNFVNNRLEFKESENKQKVITVNGRATAYLRSRWGLNKVREDGDKHHALDAAVVGVTTQGMVQKISKYSKAHELYTVRKNDEFVDVETGECVDVDEYKEIRKDILPRPWRGFSEELKLRLSDNPLEELKKSPIETYNEEFIKENVKPIFVSRVPFRKISGKLFKETIYSERAFKDGYFVSKKSLVDLKRGDLDNFYNYECDKKLYDAISERMKEFNYNGKKAFESPFRKPTKSGKEGPVVRSVKIKSAVPFKDGIPMNEGLVAKEGMVRIDIYEKEGKYFVVPVYRYQLAKGIVPKRAAIAKKDELKWPIMDQTYNFKFSIYKNDLIEVKYDKKGVYFGYYDGFDRNSASLTIEKHDNSERYRSIGLKVGVLEINKYEVDVLGNYHKVKLGGN

SEQ ID NO: 64 - protein, 1195 aa, Elusimicrobium minutum
MQKNINTKQNHIYIKQAQKIKEKLGDKPYRIGLDLGVGSIGFAIVSMEENDGNVLLPKEIIMVGSRIFKASAGAADRKLSRGQRNNHRHTRERMRYLWKVLAEQKLALPVPADLDRKENSSEGETSAKRFLGDVLQKDIYELRVKSLDERLSLQELGYVLYHIAGHRGSSAIRTFENDSEEAQKENTENKKIAGNIKRLMAKKNYRTYGEYLYKEFFENKEKHKREKISNAANNHKFSPTRDLVIKEAEAILKKQAGKDGFHKELTEEYIEKLTKAIGYESEKLIPESGFCPYLKDEKRLPASHKLNEERRLWETLNNARYSDPIVDIVTGEITGYYEKQFTKEQKQKLFDYLLTGSELTPAQTKKLLGLKNTNFEDIILQGRDKKAQKIKGYKLIKLESMPFWARLSEAQQDSFLYDWNSCPDEKLLTEKLSNEYHLTEEEIDNAFNEIVLSSSYAPLGKSAMLIILEKIKNDLSYTEAVEEALKEGKLTKEKQAIKDRLPYYGAVLQESTQKIIAKGFSPQFKDKGYKTPHTNKYELEYGRIANPVVHQTLNELRKLVNEIIDILGKKPCEIGLETARELKKSAEDRSKLSREQNDNESNRNRIYEIYIRPQQQVIITRRENPRNYILKFELLEEQKSQCPFCGGQISPNDIINNQADIEHLFPIAESEDNGRNNLVISHSACNADKAKRSPWAAFASAAKDSKYDYNRILSNVKENIPHKAWRFNQGAFEKFIENKPMAARFKTDNSYISKVAHKYLACLFEKPNIICVKGSLTAQLRMAWGLQGLMIPFAKQLITEKESESFNKDVNSNKKIRLDNRHHALDAIVIAYASRGYGNLLNKMAGKDYKINYSERNWLSKILLPPNNIVWENIDADLESFESSVKTALKNAFISVKHDHSDNGELVKGTMYKIFYSERGYTLTTYKKLSALKLTDPQKKKTPKDFLETALLKFKGRESEMKNEKIKSAIENNKRLFDVIQDNLEKAKKLLEEENEKSKAEGKKEKNINDASIYQKAISLSGDKYVQLSKKEPGKFFAISKPTPTTTGYGYDTGDSLCVDLYYDNKGKLCGEIIRKIDAQQKNPLKYKEQGFTLFERIYGGDILEVDFDIHSDKNSFRNNTGSAPENRVFIKVGTFTEITNNNIQIWFGNIIKSTGGQDDSFTINSMQQYNPRKLILSSCGFIKYRSPILKNKEG

SEQ ID NO: 65 - protein, 1101 aa, Akkermansia muciniphila
MSRSLTFSFDIGYASIGWAVIASASHDDADPSVCGCGTVLFPKDDCQAFKRREYRRLRRNIRSRRVRIERIGRLLVQAQIITPEMKETSGHPAPFYLASEALKGHRTLAPIELWHVLRWYAHNRGYDNNASWSNSLSEDGGNGEDTERVKHAQDLMDKHGTATMAETICRELKLEEGKADAPMEVSTPAYKNLNTAFPRLIVEKEVRRILELSAPLIPGLTAEIIELIAQHHPLTTEQRGVLLQHGIKLARRYRGSLLFGQLIPRFDNRIISRCPVTWAQVYEAELKKGNSEQSARERAEKLSKVPTANCPEFYEYRMARILCNIRADGEPLSAEIRRELMNQARQEGKLTKASLEKAISSRLGKETETNVSNYFTLHPDSEEALYLNPAVEVLQRSGIGQILSPSVYRIAANRLRRGKSVTPNYLLNLLKSRGESGEALEKKIEKESKKKEADYADTPLKPKYATGRAPYARTVLKKVVEEILDGEDPTRPARGEAHPDGELKAHDGCLYCLLDTDSSVNQHQKERRLDTMTNNHLVRHRMLILDRLLKDLIQDFADGQKDRISRVCVEVGKELTTFSAMDSKKIQRELTLRQKSHTDAVNRLKRKLPGKALSANLIRKCRIAMDMNWTCPFTGATYGDHELENLELEHIVPHSFRQSNALSSLVLTWPGVNRMKGQRTGYDFVEQEQENPVPDKPNLHICSLNNYRELVEKLDDKKGHEDDRRRKKKRKALLMVRGLSHKHQSQNHEAMKEIGMTEGMMTQSSHLMKLACKSIKTSLPDAHIDMIPGAVTAEVRKAWDVFGVFKELCPEAADPDSGKILKENLRSLTHLHHALDACVLGLIPYIIPAHHNGLLRRVLAMRRIPEKLIPQVRPVANQRHYVLNDDGRMMLRDLSASLKENIREQLMEQRVIQHVPADMGGALLKETMQRVLSVDGSGEDAMVSLSKKKDGKKEKNQVKASKLVGVFPEGPSKLKALKAAIEIDGNYGVALDPKPVVIRHIKVFKRIMALKEQNGGKPVRILKKGMLIHLTSSKDPKHAGVWRIESIQDSKGGVKLDLQRAHCAVPKNKTHECNWREVDLISLLKKYQMKRYPTSYTGTPR

SEQ ID NO: 66 - protein, 1187 aa, Bifidobacterium longum
MLSRQLLGASHLARPVSYSYNVQDNDVHCSYGERCFMRGKRYRIGIDVGLNSVGLAAVEVSDENSPVRLLNAQSVIHDGGVDPQKNKEAITRKNMSGVARRTRRMRRRKRERLHKLDMLLGKFGYPVIEPESLDKPFEEWHVRAELATRYIEDDELRRESISIALRHMARHRGWRNPYRQVDSLISDNPYSKQYGELKEKAKAYNDDATAAEEESTPAQLVVAMLDAGYAEAPRLRWRTGSKKPDAEGYLPVRLMQEDNANELKQIFRVQRVPADEWKPLFRSVFYAVSPKGSAEQRVGQDPLAPEQARALKASLAFQEYRIANVITNLRIKDASAELRKLTVDEKQSIYDQLVSPSSEDITWSDLCDFLGFKRSQLKGVGSLTEDGEERISSRPPRLTSVQRIYESDNKIRKPLVAWWKSASDNEHEAMIRLLSNTVDIDKVREDVAYASAIEFIDGLDDDALTKLDSVDLPSGRAAYSVETLQKLTRQMLTTDDDLHEARKTLFNVTDSWRPPADPIGEPLGNPSVDRVLKNVNRYLMNCQQRWGNPVSVNIEHVRSSFSSVAFARKDKREYEKNNEKRSIFRSSLSEQLRADEQMEKVRESDLRRLEAIQRQNGQCLYCGRTITFRTCEMDHIVPRKGVGSTNTRTNFAAVCAECNRMKSNTPFAIWARSEDAQTRGVSLAEAKKRVTMFTFNPKSYAPREVKAFKQAVIARLQQTEDDAAIDNRSIESVAWMADELHRRIDWYFNAKQYVNSASIDDAEAETMKTTVSVFQGRVTASARRAAGIEGKIHFIGQQSKTRLDRRHHAVDASVIAMMNTAAAQTLMERESLRESQRLIGLMPGERSWKEYPYEGTSRYESFHLWLDNMDVLLELLNDALDNDRIAVMQSQRYVLGNSIAHDATIHPLEKVPLGSAMSADLIRRASTPALWCALTRLPDYDEKEGLPEDSHREIRVHDTRYSADDEMGFFASQAAQIAVQEGSADIGSAIHHARVYRCWKTNAKGVRKYFYGMIRVFQTDLLRACHDDLFTVPLPPQSISMRYGEPRVVQALQSGNAQYLGSLVVGDEIEMDFSSLDVDGQIGEYLQFFSQFSGGNLAWKHWVVDGFFNQTQLRIRPRYLAAEGLAKAFSDDVVPDGVQKIVTKQGWLPPVNTASKTAVRIVRRNAFGEPRLSSAHHMPCSWQWRHE

SEQ ID NO: 67 - protein, 166 aa, uncultured Termite
MNKVQEIEYKKIREKLADREYRIGLDLGVGSIGYVVVSLKECNDLSYLPEDIILSGSRIFKSSIGAVERREFRLQRNSHRHHRERMRFLWQLLAEKQLALQSSKDLEKKENSADCETSQKRFPINILKEDPYILRYKALEEKLSLFQLGYVLYHIANHSNTAYENT

SEQ ID NO: 68 - protein, 1032 aa, uncultured Termite
MLYHIANHRGTDSVRSFLEYDDDKIKENTLTAKIAKETKKVIDAKKYRTFGEYLYKGKIEKFQQNIRKKVSNRKTPANKNKEFAVTRDVIIKETEKILASQKQYYTYILTDEYIKKIKDAISYQTEKLIPESGYCPYFKDEKRLPRSHKLNEYRRMYEALNNAKYFDPVLDENTGEILSYQEKEFSREEKKILFDEVLLKGMELTESGAKKLLYHLPDGCEVQLQGRDKTTQKIKGYALVDLEASPFWLRLSQQQQDEFLYDWNSLPLEKLKPKLTNYYSLTESEVDETFQEIKLPSNYASVGKKAMEILLTYIKDGCSYTEALEKAVSEGKLKVDKQTMIYDSLPYYGKILKESTQKLIGKAFSKQFADRNYKEPDTNKNEREFGKIANPVVHQTLNELRKLINEIITVFGKKPLEIGLETTRELKKSKKNREYLSKQQNKNEYARNRIYKEYIEPHLSQIKSRQENPSKYISKFELLEEQNFICPFCSEKITPDDIINSKVDVEHIFPIEESEDITKNNLVIAHNECNADKGKKSPFDAFGDKTSGKYRWNCILHNAQKNLPHKVWRFYQGSLEKFLENKPMSRRFGTDNSYISKIAARYLACLFNDPYHSEIFCIKSSLIAQLRIAWDLNSIMVPLVKNILSEKELEEFKISKNKKIRIDNRHHALDAIVIAYANRGYHNFLNRIHAKEYKINYREKSWLSKILLPPLNRDLEDFKISVKDSIEKANVSIKHDHNTNGSLVKATAYKVYYSGAGEYIITTSKNVEEISFKEKEDPKDTLYRALCKFECRDIDIKDEKLIKKLKYNSTLYKKVQNNLSKAKQELEQDNKKTEEEGKKSQKITEVRIYKKACSLVKGQYIQCGSRLKDKFFAVKEPTEIKTGLGYDTGDNLFLDLYYDKTGKLCGEIIRKVNFNRNKPNYQKEGYTLFERIYQSDILEVDTSEDRISLKNKTGSAPSDRTFIKVNTFTEVNAYFDGKRDKIQIFFGNLLKSSFKNDSFFISSMQKYNVRKVILTSLGIIKYRSQILKNKEV

SEQ ID NO: 69 - protein, 1032 aa, uncultured Termite
MKKRILGLDIGIASVGWALVEFDDEFQDNKKKGTIIKSGVRIFTRAETPKERESLAKPRREARSQRRRIRRRVERLNSIRELFVKNGVVEEWSVSKKNPNNIYITLNQIKTPWQLRMESLDRKLTNEQFAVVLTHLAKHRGYKSLRKDDKAGKVLEAISQNKKRLNDSDYRTLGEMFCKNESYKEHKRNKGGEYINSVARELIEEEVEKIFVKQREKGNNFADVNTEREYLKIAFSQKPAGSISKMVGFCTFENGEKRAPRDSYSAELFKVLCTINNTTFTDMKTGEIRSFSKEEIGKTLETVKNVKDVKYAKIRKDLGLEDSVKFSGVDYRENAKSKGEGEIFVSMKTYHEIKSKIEKLSKEKWDNLKGNTELLDSIVNIIANLKDDESIKKEFQKLKIDEDIIDVLLNFEFKKFINLSFKALRKIIPFQFQGQKYITASTSAGYSLKQEGIKNKLVPPAKENINVAVVARAFAQTRKVINAVIRKYGQFDQINIELATELKNSKFDRSKIEEGQKKFQSQKDKIFKEVQELRGGMTPSSSLLLKYRLWREQDERCVYSGRKISFEDLLDTGFLDIDHIIPYSKSMDDSFNNKVLCLAEENRNKKNDIPFNYYQRIDRDWNLLISIITSMKNMKIAKKSRLLKQELSDIEGFIERNINDTRYATRYIKDFLENNLEFKENEFIKVKVQARSGGLTSVLSYNWGMSKDREESYFHHAKDAIIVACSTQGMVQYISKISQQYENDKDKMKKIKDKTENCIPKPWDSFRADVEESIEGIFVSFAPRHKVTGSAHKETIYSKKHLEKERYVTVKKSLDKIKLSDLENIPCNENCGIIRVLKERLEKFKNDSLKAFADPVHMPTKCPNKKGPVIRSVKIKESNKTGIEVRKGLAERGEMVRVDVFIKDKKYYLVPIYVSDFKNKDLPNKAIAALKLENEWIMIDKTYSFKFSLFKDDLIKIKKKKEEIFGYFGGVHRSTGTIKIKSRHKPKEIDEGIGSRCLLDFRKFQVDVLGNYTEVKHEKRMPAYITRKDKKH

SEQ ID NO: 70 - protein, 1361 aa, Lactobacillus casei
MTKLGKPYGIGVDIGSNSIGFAAVDENSHLIRLKGKTVIGARLFEEGKAAADRRASRTTRRRLSRNRWRLSFLRDFFESHITPTGPNFFMRQKYSEISPKDKARYKYEKRLFNDRTDAEFYQQYPTMYHLRNRLLTDPSKADVREIYFAIHHILKSRGHFLTSGYAKDFNTNKVALNEIFPALQDAYAQVYPDLDITFDENKVNEFKTVLLNEKATPSDTQRALVNLLLAEDGDKDILKQQKQVLTEFAKAVVGLKTKLNVALGTEVDSSEATVWNFSLGQLDDKWAGIESAMTDEGTEILDQIRDLYRARLLNGIVPAGKTLSQAKVDDYAQHHEDLELFKDYLKQLEDDGTAKAIRQLYDRYIDGDDAKPFVREDFVKALTKEVTAHPNAKSPELLERLAQPDFMLKQRNKANGAIPVQMQQRELDQIIKNQSVYYDWLAAPNPVEKHRKSMPYQLDELLNFRIPYYVGPLVTAKEQKAAQGGVFAWMVRKDPDGNITPYNFDEKVDREASANTFIQRMKTTDTYLIGEDVLPKQSLLYQRYEVLNELNNVRVNNEKLSIEQKQQVIRELFERHNSVTIKQFAENLRAHGDYAHIPEIRGLADEKRFLSSLSTYRQLKSLLPDAIDDPAKQADIENIIAWSTVFEDAAIFKTKLKEINWLDSQTITKLSNIRYRGWGQFSHKFLNGLTLGNGHTIIQELFLSNNNLMQILTDETLQKKMTELNADKLKAANINDAIDDAYTSPSNKKALRQVLRVIEDIKRAADGQDPSWLYVETADGGGTPGKRTRARQHQLQEIYANAAHELIDSAVRGELEDKIADKADFNDRLVLYFMQGGRDIYTGTPLNIDQLSSYDIDHILPQSLIKDNSLDNRVLVHAIINREKNATFASTIYAQKMNATWRQWHEAGLISGRKLRNLQMRPDQIDKYASGFVARQLVETRQIIKLTEQIVAAQYPETKIIAVKAGLSHQLREELEFPKNRDVNHYHHAFDAFLAARIGTYLLKRFPNLQAFFTYGKFKKADVKKLRGFNFIRDITHAEDKIVVKDTGEVIWDKKRDVDELDRIYNFKRMLITHEVHFEKADLFKQTVYGAKDSKEAGGKKQLISKKKGYPVDIYGGYTQETGSYLSVVRLTKKAMYAVVKVSTRDAAKLAVAKSISEQKENETLNDIIDEKLSKISKNGKITHELFEVVLPRVGQKTLFKNSKYNLFLVNSDTYMHNYQELWMPREYQKMWKDISLSKYGDAQTEDQLDQIFGFIVSQVNSYFNLYDINQFRKKLNDAADKFATLPMRDTDDMQGKIATIGQLLIGLQANAARSDLRNLDIKTPLGLLQIPNGISLDSDTSVVYQSPTGLLEREVHLSDL

SEQ ID NO: 71 - protein, 1348 aa, Streptococcus equi
MKKPYTIALDIGTNSVGWVVVTDDYRVPTKKMKVLGNTERKTIKKNLIGALLFDSGDTAEGTRLKRTARRRYTRRKNRLRYLKEIFTEEMAKVDDGFFQRLEDSFYVLEDKEGNKHPIFANLADEVAYHKKYPTIYHLRKELVDNPQKADLRLIYLAVAHIIKFRGHFLIEGTLSSKNNNLQKSFDHLVDTYNLLFEEQRLLTEGINAKELLSAALSKSKRLENLISLIPGQKKTGIFGNIIALSLGLTPNFKANFGLSKDVKLQLAKDTYADDLDSLLAQIGDQYADLFLAAKNLSDAILLSDILTESDEITRAPLSASMVKRYREHHKDLVTLKTLIKDQLPEKYQEIFLDKTKNGYAGYIEGQVSQEEFYKYLKPILARLDGSEPLLLKIDREDFLRKQRTFDNGSIPHQIHLEELHAILRRQEVFYPFLKDNRKKIESLLTFRIPYYVGPLARGHSRFAWVKRKFDGAIRPWNFEEIVDEEASAQIFIEKMTKNDLYLPNEKVLPKHSLLYETFTVYNELTKVKYATEGMTRPQFLSADQKQAIVDLLFKTNRKVTVKQLKENYFKKIECWDSVEITGVEDSFNASLGTYHDLLKIIQDKDFLDNPDNQKIIEDIILTLTLFEDKKMISKRLDQYAHLFDKVVLNKLERHHYTGWGRLSGKLINGIRDKQSGKTILDFLKADGFANRNFMQLIHDSELSFIDEIAKAQVIGKTEYSKDLVGNLAGSPAIKKGISQTIKIVDELVKIMGYLPQQIVIEMARENQTTAQGIKNARQRMRKLEETAKKLGSNILKEHPVDNSQLQNDKRYLYYLQNGKDMYTGDDLDIDYLSSYDIDHIIPQSFIKNNSIDNKVLTSQGANRGKLDNVPSEAIVRKMKGYWQSLLRAGAISKQKFDNLTKAERGGLTQVDKAGFIQRQLVETRQITKHVAQILDSRFNTEFDDHNKRIRKVHIITLKSKLVSDFRKEFGLYKIRDINHYHHAHDAYLNAVVAKAILGKYPQLAPEFVYGDYPKYNSFKERQKATQKMLFYSNILKFFKDQESLHVNSDGEEIWNANKHLPIIKNVLSIPQVNIVKKTEVQTGGFYKESILSKGNSDKLIPRKNNWDTRKYGGFDSPTVAYSVLVIAKMEKGKAKVLKPVKEMVGITIMERTAFEENPVVFLEARGYREIQEHLIIKLPKYSLFELENGRRRLLASASELQKGNELFLPVDYMTFLYLAAHYHELTGSSEDVLRKKYFVDRHLHYFDDIIQMINDFAERHILASSNLEKINHTYHNNSDLPVNERAENIINVFTFVALGAPAAFKFFDATIDRKRYTSTKEVLNATLIHQSVTGLYETRIDLSQLGEN

SEQ ID NO: 72 - protein, 1341 aa, Ruminococcus lactaris
MGKGYYVGLDMGTGSVGWAVTDESYQILRRHGKAMWGVRLFESAKTAEERRMFRTGRRRLDRRGWRIEILQEIFAEEISRVDPGFFLRMKESKYYPEDKRDIQGNCPELPYTLFVDKTFTDKDFHKKYPTIYHLRKMLMETEDTPDMRLVYLALHHMMKHRGHFLLSGDISQVTEFKNTFNQFIENIRNEEMDFEIELDESAVQMIEETLKDKNLTRSAKKSKLVKGLNAKNVRDKAFLTLLSGGTVKLSDLFGMEELNEGERPKISFADNGYEEYAAVVEMELGELYYIVESAKAVYDWAILSDILGGSTSVSDAKVRAYEKHKADLKYLKAVVKEYFPKEVYNAVFVESSDKLNNYPAYIGMTKKNGKKVSLEGKRCSREEFMDFLKKNIVVKLPDEEAKMYLQSELEKDSFLPKQVNKDNGVIPYQVHKYELKKILDNLGDKIPFLKENAEKIEKLFSFRIPYYVGPLRTGNGENSKFAWAERKSTEKIYPWNFENVIDVEQSAENFIRRMTNKCTYLIGEDVLPKDSLLYSKFMVLNELNNLRLDGQKISVELKQKIYRDVFCRSRKVTQKKLKSYLIREGIAGKNVELTGIDGDFKGSLTAYHDFKEKLIDVELTQKEKEEIILNIVLFGDDKKLLKQRLKKKFPQLTEKQINTVTALSYKGWGRLSKKLLEEVTVPAPETGEVWNIITALWETNDNFMQLLSKEYQFSDRIEEFNEEKADPEVSYQTIEDLYVSPAVKRQIWQTLQIIQEIEKVMGEKPKRVFVEMAREKQENKRTESRKKTLSDLYTKCKKEEPEWIEALCTSLEKHEEHQLRSDKLYLYYTQKGRCMYSGEPIDLEDLWDNTKYDIDHIYPQSKTMDDSLKNRVLVKKEYNAKKSDTYPIAADIQKKMMPFWKSLLTGGFIPKEKYDRLVRNNPLDANELAGFIERQIVETRQSTKAVAEILKKILPDTEIVYVKAKTVSKFRQDFDFIKVRDMNDLHHAKDAYLNIVVGNVYFVKFTKNAAWFVKENPGRTYNLEKMFIWDVARDGEIAWKAGKSGSIVQVRAMMEKNHILVTRRSYEVKGGLFDQQILKKGKGQVPVKESDERLRDIGKYGGYNKAAGVYFMLVSSKDKKGKEQRTIEFVPIYLKDRVEKDMESARNYLMEERGLREPKILIKKIKIDTLFKVDGFYMWLSGRTSNQLIFKGANQLILSKEDMKTLKKVVKYIQRQKEDKNVKISMRDGITEEELLKLYETFLDKIRHSIYGARLSSQEKTLVNGKEKFIDLSVEAKCQVLYEILHLFQCQSGAANLKMIGGPASAGILVMNNNISKCKNISIVNQSPTGIYEKEIDLLRV

SEQ ID NO: 73 - protein, 1003 aa, Gluconacetobacter diazotrophicus
MIDESLTFGIDLGIGSCGWAVLRRPSAFGRKGVIEGMGSWCFDVPETSKERTPTNQIRRSNRLLRRVIRRRRNRMAAIRRLLHAAGLLPSTDSDALKRPGHDPWELRARGLDKPLKPVEFAVVLGHIAKRRGFKSAAKRKATNISSDDKKMLTALEATRERLGRYRTVGEMFARDPDFASRRRNREGKYDRTTARDDLEHEVHALFAAQRRLGQGFASPELEEAFTASAFHQRPMQDSERLVGFCPFERTEKRAAKLTPSFERFRLLARLLNLRITTPDGERPLTVDEIALVTRDLGKTAKLSIKRVRTLIGLEDNQRFTTIRPEDEDRDIVARTGGAMTGTATLRKALGEALWTDMQERPEQLDAIVQVLSFFEANETITEKLREIGLTLAVLDVLLTALDAGVFAKFKGAAHISTKAARNLLPHLEQGRRYDEACTMAGYDHAASRLSHHGQIVAKTQFNALVTEIGESIANPIARKALIEGLKQIWAMRNHWGLPGSIHVELARDVGNSIEKRREIEKHIEKNTALRARERREVHDLLDLEDVNGDTLLRYRLWKEQGGKCLYTGKAIHIRQIAATDNSVQVDHILPWSRFGDDSFNNKTLCLASANQQKKRSTPYEWLSGQTGDAWNAFVQRIETNKELRGFKKRNYLLKNAKEAEEKFRSRNLNDTRYAARLFAEAVKLLYAFGERQEKGGNRRVFTRPGALTAALRQAWGVESLKKQDGKRINDDRHHALDALTVAAVDEAEIQRLTKSFHEWEQQGLGRPLRRVEPPWESFRADVEATYPEVFVARPERRRARGEGHAATIRQVKERECTPIVFERKAVSSLKEADLERIKDGERNEAIVEAIRSWIATGRPADAPPRSPRGDIITKIRLATTIKAAVPVRGGTAGRGEMVRADVFSKPNRRGKDEWYLVPVYPHQIMNRKAWPKPPMRSIVANKDEDEWTEVGPEHQFRFSLYPRSNIEIIRPSGEVIEGYFVGLHRNTGALIPTPVGPDSYVIA

SEQ ID NO: 74 - protein, 1368 aa, Streptococcus pyogenes
MDKKYSIGLDIGTNSVGWAVITDDYKVPSKKFKVLGNTDRHSIKKNLIGALLFDSGETAEATRLKRTARRRYTRRKNRICYLQEIFSNEIAKVDDSFFHRLEESFLVEEDKKHERHPIFGNIVDEVAYHEKYPTIYHLRKKLADSTDKADLRLIYLALAHMIKFRGHFLIEGDLNPDNSDVDKLFIQLVQTYNQLFEENPINASRVDAKAILSARLSKSRRLENLIAQLPGEKRNGLFGNLIALSLGLTPNFKSNFDLAEDAKLQLSKDTYDDDLDNLLAQIGDQYADLFLAAKNLSDAILLSDILRVNTEITKAPLSASMIKRYDEHHQDLTLLKALVRQQLPEKYKEIFFDQSKNGYAGYIDGGASQEEFYKFIKPILEKMDGTEELLAKLNREDLLRKQRTFDNGSIPHQIHLGELHAILRRQEDFYPFLKDNREKIEKILTFRIPYYVGPLARGNSRFAWMTRKSEETITPWNFEEVVDKGASAQSFIERMTNFDKNLPNEKVLPKHSLLYEYFTVYNELTKVKYVTEGMRKPAFLSGEQKKAIVDLLFKTNRKVTVKQLKEDYFKKIECFDSVEISGVEDRFNASLGTYHDLLKIIKDKDFLDNEENEDILEDIVLTLTLFEDREMIEERLKTYAHLFDDKVMKQLKRRRYTGWGRLSRKLINGIRDKQSGKTILDFLKSDGFANRNFMQLIHDDSLTFKEDLQKAQVSGQGDSLHEHIANLAGSPAIKKGILQTVKVVDELVKVMGRHKPENIVIEMARENQTTQKGQKNSRERMKRIEEGIKELGSDILKEYPVETTQLQNEKLYLYYLQNGRDMYVDQELDINRLSDYDVDHIVPQSFLKDDSIDNKVLTRSDKNRGKSDNVPSEEVVKKMKNYWKQLLNAKLITQRKFDNLTKAERGGLSELDKAGFIKRQLVETRQITKHVAQILDSRMNTKYDENDKLIREVRVITLKSKLVSDFRKDFQFYKVREINNYHHAHDAYLNAVVGTALIKKYPKLESEFVYGDYKVYDIRKMIAKSEQEIGKATAKYFFYSNIMNFFKTEITLANGEIRKRPLIETNGETGEIVWDKGRDFATVRKVLSMPQVNIVKKTEVQTGGFSKESILPKRNSDKLIARKKDWDPKKYGGFDSPTVAYSVLVVAKVEKGKSKKLKSVKELVGITIMERSSFEKDPVDFLEAKGYKEVRKDLIIKLPKYSLFELENGRKRMLASAGELQKGNELALPSKYVNFLYLASHYEKLKGSPEDNEQKQLFVEQHKHYLDEIIEQISEFSKRVILADANLDKVLSAYNKHRDKPIREQAENIIHLFTLTNLGAPAAFKCFDTTIGRNRYKSIKEVLDATLIHQSITGLYETRIDLSQLGGD

SEQ ID NO: 75 - protein, 1504 aa, Bacteroides dorei
MKNIVGLDLGTNSIGWAVVNGSVNDDGSEQLVKIQASGSRIIPMDAAMIGDFNKGNSISQTAERTRLRGVRRLSERYLLRRERLHRILDILGFLPFHFAQDLDRHGKIVKGKEPKLAWRKNEAGQFEFIFQDSFKEMLEDFKLNYPNLITDDKKVPYDWTIYYLRKKGLTSKISKEELAWILLNFNQKRGYYQLRGEEEEENKDKLVEFYALKVVAVEDSGEKKGKDIWYNVHLENGWVYRRTSNMSLDWVGKTKEFIVTTDLEKDGTPKKDKEGNVKRSFRAPKEDDWSLVKKKTEADIDQTHKTVGAYIYDTLLGNPSQKIRGRLVRTIERKYYKEELKLILEKQKEFHLELQDRALYAACIEELYPINEAHRNNVGNRDFTYLFLEDILFYQRPLKSKKSLIDNCPYEENQGLDKETGEIKSFPVKCIAKSHPLFQEFRLWQFIINLRIYRKDLAQDVDVTNELLKTEEDYVALFDWLNGKKEIDQKAFLKYPVFGLKKEIENYRWNYVQDKPYPCNETRSLMLARLEKCDISIEFLTKENEEALWHILYSVEDKNEIVKALQKFADKHDLNASFVDVFQKFPPFKKEYGSYSAKAIKKLLPLMRMGKYWSENSIDKGTRERIDKIITGEYDEKIENRVREKAIHLADVSDFKGLPLWLVCYIVYGRHSEAKEIIQWKSPADIDSYLRSFKQHSLRNPIVEQIIIETLRVVRDIWKQVGNIDEIHVELGREMKNPADKRKKMTQQMSENENTNLRIKYLLTEFLNPEYEVENVRPYSPSQQDILRIYEEGVLNSVSDLPEEISDILKKFTETDLKKRPSRSEVLRYKLWLEQKYRSPYTGEVIPLGKLFTPAYEIEHVIPQSYYFDDSFSNKVICEAEVNKLKSNLLGHEFIVKHHGEIVELPFGKKVRIFTVDEYEQFVKDNYSRTRSKMKKLLMDDIPEEFVTRQLNDSRYISKVVKSLLSNIVREKGEEEAISKNVIPCTGGVTDRLKKDWGINEVWNKIILPRFQRLNELTGTNKFTTKNVGIQEIPTMPLELQKGFNKKRIDHRHHAMDAIIIACANRNIINYLNNKSATAKAELSRYDLQKMLCDKAKTDNNGNYKWVIRKPWASFTQDTYLALENIIVSFKQNLRVINKATNRFLHYNEEGKKIFVKQGKGDNWAIRKSMHKDTVFGEVNLRRIKTVALNEAMKNPQSIVVKDFKRKLLELWNLGFDAKRIKKYFEDNRETWSDINLSKIEVYYFSKDTKDRFFATRKPLDTSFDRKKIENNITDTGIQKILLRHLELKDNNPDIAFSPDGIDEMNRNIIQLNNGKYHQPIIKIRWYEQADKFAVGQTGNKSSKFVEAAKGTNLFFAVYESNILDKKTNTIIKKRNYATIPLNVAIERQKQGLPVAPEDENGNDPIFVLSPNDLVYLPTDDELANGIIAQPLDRGRIYKMVSSSGEQCFFIKHIVANVLVDKFEFSPLNKMERALTGEMIKMICIPIKVDRLGNVLESSSSYKK

SEQ ID NO: 76 - protein, 1426 aa, Capnocytophaga sputigena
MKNILGLDLGITSISFAHIVEDENKEKSEIKELGVRIVSLTTDEQSDFEKGKSITTNANRTLKHGARLNLDRYQQRRKYLIDLLQKANLITSSSILAENGKNTTHSTWQLRAKAVTERIEKEEFARVLLAINKKRGYKSSRKAKTEDEGQAIDGMAIAKRLYDENLTPGQLSLQLLQQNKKLLPDFYRSDLQREFDLVWNFQKQFYPDILTDSFYKELQGKGKDATSKAFSKRYHFDTAENKGSKESVRLQAYQWRAEAISKQLSKEEVAYVLTEINNNLNNASGYLGAISDRSKELYFNRQTVGQYLYAQLQENRHNSLKNKVFYRQDYLDEFERIWETQASFHKELTDELKKQIRDVVIFYQRKLKSQKGLISFCEFESKEIEIEKDGKTITKTIGARVVPKSSPLFQEFKIWQILNNVTCKRKGIRKKKSSAKSTELDLFNEPSQTIFSLDMECKQLLFDELNLKGDLKSDKVLKLLGYSPQEWEINYNQLEGNRTQKALYEAYLKIVEMEAHDVKDILQIKSAKDDWSLDESPLSASEIKEKVKDIFQALGICTKILYFDPLLPVKEFEKQDSYQLWHLLYSYESDDSTSGNETLYRILEKKYAFKREHARILANVALQDDYGSLSTKAIRKIYPNIKENQYSKACELAGYKHSKLSLTTEELEARELKNIIPLLKKNALRNPVVEKILNQMINVVNALIEKNSERDAEGKITKYFHFDEIRIELARELKKNAQKRYEMTQNINKAKLEHQKISEILQKKFGIKNPTKSDIIRYRLYQELEHNGYKELYTNAPIARDMLFSKNIEIEHIVPKARVFDDSFSNKTLTFHRINSNKGEYTAFDYITSLNSEEELNQYLTRVENAYKTKSISLTKYKNLLKKASEIGDGFINRDLRDTQYIAKKAKEILFQVTKNVLSTSGSITDRLREDWGLVDVMKELNMPKYQSLGLTEVEERKEGNKVTVIKNWTKRNDHRHHAMDALTVAFTKPSYIQYLNHLNARKDENNKNYSVILAIEEKETIKVPTNNGKNKRVFIEPIPNFRQVAKKHLEEIFISHKAKNKVVTKNVNKPAGTDKQQITLTPRGQLHKETIYGKYQYYVNKEEKVGVKFDERTITKVSNPLYREALLKRLQANDNDPKKAFTGKNALSKNPIYLDETKTKTLPEKVNLTYLEEDFSIRKDISPDNFKDLKSIEKVIDQGVKRILIKRLQDYDNDPKKAFVDLEKNPIWLNKEKGIAIKRVTISGVSNAQPLHIGKDHLGKTTLNKEGNEIPVDYVSTGNNHHVAIYRDKEGNLQEQIVSFFEAVVRTQQGLPIIDKTYKQEEGWQFLFTMKQNEMFVFPNATTGFNPAEIDLLDPKNKKLISPNLFRVQKIATKDYFFRHHLETNVETDNVLKNTTWKREGLSGLKDIVKVRINHLGDIVSIGEY

SEQ ID NO: 77 - protein, 1443 aa, Parabacteroides johnsonii
MIKLLYLEKLKQYTMKKILGLDLGTSSIGWALVNEAENSDEVSSIIKLGVRVNPLTVDEMQNFEKGKSITTNADRTLKRSMRRNLQRYKLRRDALIELLKKVGFITDKTILSEQGNRTTFETYRLRAKAAEEEISLKELARVLLMINKKRGYKSSRKAKGEEEGALIDGMEIAKKLYDEDLTPGQLCLQLLESGKKFFPDFYRSDLQEEFNKIWDFQKQFNLFSFCDVAKEEVKGKNKSQTWAILAKYFVETKKVNVWNEHEAQTENREEVYKLVGLKRTVKGEELKKENYRWRVQALTEQLDLEKIAVVLQEINGQISASSGYLGAISDRSKVLYFNRQTVGQYQMAELNKNPNMSLRNMVFYRQDYLDEFNVIWEKQAEFHKELTPELKKEIRDIIIFYQRRLKSQKGLISFCEFENREVVVEKEGKKQTKIIGCKVIPRSHPLFQEFKIWQTLNNIEVFVGEKKGKRKKSNVSSDLFGDTEDALITEGRRFLYQEEKKILAKELSIKKGLTKAEILRLLFENPQELDINFKQIDGNQTGFALFSAYSNMIEKYGYEPLDFKKPAEDLISQLKTVFTDLGWNTDLLFIDLDKENKEWEKQPYFRLWHLLYSFEGDNTPTGNGKLIEKIMQLCGIEKEYAIELANVSLQDDYGSLSAKAIKKILLYLKEGNQYDMACEYAGYRHSKSSLTKEEIENKVLKDKLEILPKNSLRNPVVEKILNQMVNVINTVMEVYGRPDEIRVELARELKKSAKEREELTKAVAKNTREHEEIRKVLQSEFGMINVSRNDIIRYKLYEELKDNGYKTLYSNQYIPREKLFSKEIDIEHIIPQSRLFDDSLSNKTLEYKSINIEKGNKTAYDFVKEKYGEEGLQQYLNRCENLCKDKKAKLRKLKMELNEIPDGFIDRDLRNTQYIAKKALSMLTEICRRVVATTGSITDKLREDWQLVDVMKELNLPKYEALGLVEVYEDKDGRKIKRIKDWTKRNDHRHHAMDALTVAFTKDVFIQYFNNKNAAWESDSKEHTNIVGIKTRYFESGKAVPPIPLGQFRVEAKCHLENLLVSIKAKNKVVTTNVNCIKKKGGTYKNTQQTPRGQLHLETIYGSHNQYVTKIEKVNASFDAVKIATVSKQDYRNALLKRLEVFGNDPKKAFTGKNSLEKNPIYLDRAQTIQVPDKVQTVELETAYTIRKPVDPTLNVDKVVDKKIRLILEQRLKEYGGDAKKAFVNLDENPIWLNEEKGISIKRVTIRGISKAQALHDKKDKDGNFILDETGKRIPVDFVNTGNNHHVAIYRKPVLDKKGQVIFDDEGNPMYELDEDVVPFFEAVTRANLGIPIIDKDYKKSEGWQFLFSMKQNEYFVFPNEKTGFNPKEVDLLDPDNYAMISPNLFRVQKIGLNDYTFRHHLETTIQNDLKFITWIRCGKSGIKDIVKVRINHIGQIVSVGEY

SEQ ID NO: 78 - protein, 984 aa, Campylobacter jejuni
MARILAFDIGISSIGWAFSENDELKDCGVRIFTKVENPKTGESLALPRRLARSARKRLARRKARLNHLKHLIANEFKLNYEDYQSFDESLAKAYKGSLISPYELRFRALNELLSKQDFARVILHIAKRRGYDDIKNSDDKEKGAILKAIKQNEEKLANYQSVGEYLYKEYFQKFKENSKEFTNVRNKKESYERCIAQSFLKDELKLIFKKQREFGFSFSKKFEEEVLSVAFYKRALKDFSHLVGNCSFFTDEKRAPKNSPLAFMFVALTRIINLLNNLKNTEGILYTKDDLNALLNEVLKNGTLTYKQTKKLLGLSDDYEFKGEKGTYFIEFKKYKEFIKALGEHNLSQDDLNEIAKDITLIKDEIKLKKALAKYDLNQNQIDSLSKLEFKDHLNISFKALKLVTPLMLEGKKYDEACNELNLKVAINEDKKDFLPAFNETYYKDEVTNPVVLRAIKEYRKVLNALLKKYGKVHKINIELAREVGKNHSQRAKIEKEQNENYKAKKDAELECEKLGLKINSKNILKLRLFKEQKEFCAYSGEKIKISDLQDEKMLEIDHIYPYSRSFDDSYMNKVLVFTKQNQEKLNQTPFEAFGNDSAKWQKIEVLAKNLPTKKQKRILDKNYKDKEQKNFKDRNLNDTRYIARLVLNYTKDYLDFLPLSDDENTKLNDTQKGSKVHVEAKSGMLTSALRHTWGFSAKDRNNHLHHAIDAVIIAYANNSIVKAFSDFKKEQESNSAELYAKKISELDYKNKRKFFEPFSGFRQKVLDKIDEIFVSKPERKKPSGALHEETFRKEEEFYQSYGGKEGVLKALELGKIRKVNGKIVKNGDMFRVDIFKHKKTNKFYAVPIYTMDFALKVLPNKAVARSKKGEIKDWILMDENYEFCFSLYKDSLILIQTKDMQEPEFVYYNAFTSSTVSLIVSKHDNKFETLSKNQKILFKNANEKEVIAKSIGIQNLKVFEKYIVSALGEVTKAEFRQREDFKK

SEQ ID NO: 79 - protein, 1082 aa, Neisseria meningitidis
MAAFKPNPINYILGLDIGIASVGWAMVEIDEDENPICLIDLGVRVFERAEVPKTGDSLAMARRLARSVRRLTRRRAHRLLRARRLLKREGVLQAADFDENGLIKSLPNTPWQLRAAALDRKLTPLEWSAVLLHLIKHRGYLSQRKNEGETADKELGALLKGVADNAHALQTGDFRTPAELALNKFEKESGHIRNQRGDYSHTFSRKDLQAELILLFEKQKEFGNPHVSGGLKEGIETLLMTQRPALSGDAVQKMLGHCTFEPAEPKAAKNTYTAERFIWLTKLNNLRILEQGSERPLTDTERATLMDEPYRKSKLTYAQARKLLGLEDTAFFKGLRYGKDNAEASTLMEMKAYHAISRALEKEGLKDKKSPLNLSPELQDEIGTAFSLFKTDEDITGRLKDRIQPEILEALLKHISFDKFVQISLKALRRIVPLMEQGKRYDEACAEIYGDHYGKKNTEEKIYLPPIPADEIRNPVVLRALSQARKVINGVVRRYGSPARIHIETAREVGKSFKDRKEIEKRQEENRKDREKAAAKFREYFPNFVGEPKSKDILKLRLYEQQHGKCLYSGKEINLGRLNEKGYVEIDHALPFSRTWDDSFNNKVLVLGSENQNKGNQTPYEYFNGKDNSREWQEFKARVETSRFPRSKKQRILLQKFDEDGFKERNLNDTRYVNRFLCQFVADRMRLTGKGKKRVFASNGQITNLLRGFWGLRKVRAENDRHHALDAVVVACSTVAMQQKITRFVRYKEMNAFDGKTIDKETGEVLHQKTHFPQPWEFFAQEVMIRVFGKPDGKPEFEEADTPEKLRTLLAEKLSSRPEAVHEYVTPLFVSRAPNRKMSGQGHMETVKSAKRLDEGVSVLRVPLTQLKLKDLEKMVNREREPKLYEALKARLEAHKDDPAKAFAEPFYKYDKAGNRTQQVKAVRVEQVQKTGVWVRNHNGIADNATMVRVDVFEKGDKYYLVPIYSWQVAKGILPDRAVVQGKDEEDWQLIDDSFNFKFSLHPNDLVEVITKKARMFGYFASCHRGTGNINIRIHDLDHKIGKNGILEGIGVKTALSFQKYQIDELGKEIRPCRLKKRPPVR

SEQ ID NO: 80 - protein, 1021 aa, Clostridium cellulolyticum
MKYTLGLDVGIASVGWAVIDKDNNKIIDLGVRCFDKAEESKTGESLATARRIARGMRRRISRRSQRLRLVKKLFVQYEIIKDSSEFNRIFDTSRDGWKDPWELRYNALSRILKPYELVQVLTHITKRRGFKSNRKEDLSTTKEGVVITSIKNNSEMLRTKNYRTIGEMIFMETPENSNKRNKVDEYIHTIAREDLLNEIKYIFSIQRKLGSPFVTEKLEHDFLNIWEFQRPFASGDSILSKVGKCTLLKEELRAPTSCYTSEYFGLLQSINNLVLVEDNNTLTLNNDQRAKIIEYAHFKNEIKYSEIRKLLDIEPEILFKAHNLTHKNPSGNNESKKFYEMKSYHKLKSTLPTDIWGKLHSNKESLDNLFYCLTVYKNDNEIKDYLQANNLDYLIEYIAKLPTFNKFKHLSLVAMKRIIPFMEKGYKYSDACNMAELDFTGSSKLEKCNKLTVEPIIENVTNPVVIRALTQARKVINAIIQKYGLPYMVNIELAREAGMTRQDRDNLKKEHENNRKAREKISDLIRQNGRVASGLDILKWRLWEDQGGRCAYSGKPIPVCDLLNDSLTQIDHIYPYSRSMDDSYMNKVLVLTDENQNKRSYTPYEVWGSTEKWEDFEARIYSMHLPQSKEKRLLNRNFITKDLDSFISRNLNDTRYISRFLKNYIESYLQFSNDSPKSCVVCVNGQCTAQLRSRWGLNKNREESDLHHALDAAVIACADRKIIKEITNYYNERENHNYKVKYPLPWHSFRQDLMETLAGVFISRAPRRKITGPAHDETIRSPKHFNKGLTSVKIPLTTVTLEKLETMVKNTKGGISDKAVYNVLKNRLIEHNNKPLKAFAEKIYKPLKNGTNGAIIRSIRVETPSYTGVFRNEGKGISDNSLMVRVDVFKKKDKYYLVPIYVAHMIKKELPSKAIVPLKPESQWELIDSTHEFLFSLYQNDYLVIKTKKGITEGYYRSCHRGTGSLSLMPHFANNKNVKIDIGVRTAISIEKYNVDILGNKSIVKGEPRRGMEKYNSFKSN

SEQ ID NO: 81 - protein, 1131 aa, Acidovorax ebreus
MAQHVFGLDIGIASVGWAILGEQRIIDLGVRCFDKAETAKEGDPLNLTRRQARLLRRRLYRRAWRLTQLSRLLKRKGLIADAKLFAKAPSYGDSAWELRRQGLDRLLTPLEWARVIYHQCKHRGFHWTSKAEEAKADSDAEGGRVKQGLAHTKALMQAKNYRSAAEMVLAEFPDAQRNKRGQYDKALSRVLLGEELALLFATQRRLGNPHASDFFEKLILGDGDRKSGLFWQQKPALSGADLLKMLGKCTFEKGEYRAPKASFSVERHVWLTRLNNLRIVVDGRSRPLNEAERQAALLLPYQTETSKYKTLKNAFIKAGLWGDGVRFGGLAYPSQAQIDAEKTKDPEDQFLVKLPAWHELRKAFKAAGHEALWQQISTPALDGDPTLLDQIATVLSVYKDGAEVVQQLRQLALPEPAASIAVLEKISFDKFSSLSLKALRRIVPLMQSGLRYDEAVAQIPEYGHHSQRIEPGAAKHLYLPPFYEAQRKYAGKGDHIGSMQFRDDADIPRNPVVLRALNQARKVVNALIREYGSPIAVNIEMARDLSRPLDERNKVKRAQEEFRDRNDRARSEFERDFGYKPKAAAFEKWMLYREQLGQCAYSQQPLDIQRVLDDHNYAQVDHALPYSRSYDDSKNNKVLVLTHENQNKGNRTAFEYLTSFPDGEDGERWRTFVAWVQGNKAYRMAKRNRLLRKNYGVDESKGFIDRNLNDTRYICKFFKNYVEEHLQLAARADGDTARRCVVVNGQLTAFLRARWGLTKVRGDSDRHHALDAAVVAACTHGMVKALADYSRRKEISFLQEGFPDPETGEILNPAAFDRARQHFPEPWTHFAHELKARLFTDDLAALREDMQRLGSYTTEDLGRLRTLFVSRAPQRRSGGAVHKETIYAQPESLKQQGGVIEKILLTSLKLQDFDKLLNPESNDHFVEPHRNERLYAAIRQRLEQFGGRADKAFGPDNLFHKPDKNNQPTGPVVRSIKLVRGKQTGIPIRGGLAKNDSMLRVDIFTKAGKFHLVPVYVHHRVTGLPNRAIVAFKDEDEWTLIDESFAFLFSVYPNDYVKVTLKKEQQSGYYSGADRSTGAMNLWAHDRAASVGKDGLIRGIGVKTALSVEKFNVDVLGRIYLAPPETRSGLA

SEQ ID NO: 82 - protein, 1122 aa, Streptococcus suis
MSNGKILGLDIGIASVGVGVIDAQTGEIIHASSRIFPSANAANNAERRTFRGSRRLIRRKKHRIKRLDDLFNDFHINLDGEMSTDNPYVLRVKGLSQKLTVEELYISIKNIMKRRGISYLDDAESDNEAGRSDYAKAIERNRQLLTSKTPGEIQLERLEKYGQLRGNFTIIDEEGQSQQIINVFSTSDYVKEVEKILDCQKMYHKFISDEFCDKLIELLREKRKYYVGPGNEKSRTDYGIYRTDGTTLENLFGILIGKCTFYPDQYRSSRASYTAQEFNFLNDLNNLTVPTETKKLSQEQKEFLVNYAKETSVLGAGKILQQIAKLADCKVEDIRGYRLDNKDKPELHTFETYRAMKGLVPLVDIGVLSREQLDILADILTLNTDFEGIREALKKQLPNVFDEKQVKGLASFRKSKSQLFAKGWHNLSQKIMLEVIPELYATSDEQMTILTRLGKFEKSSVAEYPSSINVDEITDEIYNPVVAKSIRQTIKIINASIKKWGEFDQIVIEMPRDRNEDEEKKRIADGQKANAKEKADSILRAAELYCAGKVLPDYVYNGHNQLATKIRLWYQQGERCIYTGQPISIHDLIHNQNQYEIDHILPLSLTFDDSLSNKVLVLATANQEKAQRTPYNYLKSATSAWSYREFKDYVTKRKGIGKKKCEYLTFEEDINGFEVRSKFIQRNLVDTRYASKVILNALQDYFKISGIQTKVSVVRGQFTSQLRHKWGIEKTRETYHHHAVDALIIAASSQLRLWKKQESPLVVDYQEGRQVDLETGEILELTDEQYKELVYQPPYQGFVNTISSSAFDNEILFSYQVDSKVNRKISDATIYATRNAQLGKDKTEGIYVLGKIKDIYTQAGYEAFLKRYTKDKTSFLMYHKDLDTWEKVIEIILRDYREYDEKGKEIGNPFERYRRENGYVKKYSRKGNGTAIKSLKYYDNKLGNHIDITPENSRNAVVLQSLKPWRTDVYFNKETGKYEFLGIKYSDLSFEKGTGEYGISQEKYDSIKIAEGVAKKSIFKFTLYKQDLLFIKDIENNFGKLLRFTSKNDTSKHYVELKPYDKNKFGTEEPLLPVLGNVAKSGQCIKGLNKSNISIYKVRTDILGYRHFIKQEGEHPQLKFKK

SEQ ID NO: 83 - protein, 1509 aa, Bacteroides coprophilus
MKKTLGLDLGTNSIGWAVINSNIDSEGKEKLVGISSCGSRIIPMDATTLGDFGKGNTKSPVAERTRLRGIRRLLERSLLRRERLHRVLSVMGFLPEHYASQLDRYGKFLPETEPKLAWYKDDSGRYQFLFQKSFHEMLEDFRQHQPELVAGEKKIPYDWTIYYLRKKALSQEITKEELAWILLNFNQKRGYYQLRGEEEQEENNKSVEYHALKVVSVEDSGERKGKDIWYNVTLENGWVYRRASNIPLDWTGKVKEFVVTTELDDAGNPKKDKEGNVKRSFRAPKEDDWGLLKTRTQAQIDESGKTVGTYIYESLLCMPNQKIRGKLVRTIERKYYKDELRQILVKQSEFHAALQDHNLLLSCIEELYPNNEAHRRLLSASSFIYFLIEDILFYQRPLKSQKGLIDNCPYESHIYKDKKDGSLHHVPLKCVSKSHPLFQEFRLWQFLSNLRIYQRERMMDGSLKLDVDVTREFLPSEEDYVKLFDWLNERKEISQKFLLAYKPFGLKKNEQANYRWNYVEDKSYPCNETRAEIKSRLSKAGVPEEFLTEEKEEALWHILYSISDKKELTKALGTFAAKNCLNESFVEVFAKIPPFESNYAAYSLKAIRKLLALMRMGKYWNEQAIDRQTRDRIEKILTGEYDETIRSRVREKAMLLTDISSFRGLPLWLACYIVYDRHSESKELVKWETPADIDHFLSKFKQNSLRNPIVEQVITESLRTVRDIWKQEGKIDEIHVELGREMKNPAKERARITAQVQENENTNLRIKALLAEFMNPEFEIENVHPYSPGQQEILRIYEDGVLSGIAEKDLPDDITAILKKFRENDVKKRPTTSEVLRYKLWLEQRYRSPYTGRVIPLGKLFTPAYEIEHVIPQSRYFDDSISNKVICESAVNKLKDNCLGYEFIKKHSGEMVELGNGETVPVFSVEEYERFVKESYFGNSKKMKKLLLEDIPDSFIERQLNDSRYISRVVTSLLSNLVCEEGEQDGLSKNVIVCTGGITDRLKKDWGVQEVWNRIILPRFLRLNEITGRTDFTSTSVNGHLLPALPLYLQKGFNKKRIDHRHHAMDAIVIACANRNIVNYLNNSSARKNSEISRYDLQRLLCEKVKTDANGNYKWILRKPWETFTQDVYAALTNIVVSFKQNLRVINRTTNYYQHYNEAGEKRMIPQTKGDRWAIRKPMHKDTVYGEVNLRKEKTLPLRDVVKNPSIVVDKSLKNKLYELLKSQYDLKAIAKYFETHQDVWADVNLKKIKVYYFTKETNERFFATRKSLDPSFDQKKIEEEVTDTGVQKILLHHLQQNNNDPDMAFSPDGIDRMNQNMTILNDGKWHQPIYKVRTYEKADKFAVGESGNKAKKFVEAAKGTNLFFAVYESVQEDEAIGKQVCKRTFATIPLNEVIKRKKQGLPAAPEDLNGNLPKFVLSPNDLVYLPTEEERNSSRIIQPLDRERIYKMVSSSGSQCFFIKVFVANSIWDKNEYSSLNKMERAITNEMIKEICVPIKIDRLGNVSLIQI

SEQ ID NO: 84 - protein, 1219 aa, Bacteroides cellulosilyticus
MKEEVRGKNRSQTWAILAKFFVWSEKESVWNEKEARTEERVKEYKLVGLKRDTKGNELKLENYRWRVQALSEQLNPEIVAIVLQEINGQISASSGYLGAISDRSKQLYFNRQTVGQYLMSELEKDPNVSLRNRVFYRQDYLDEFDRIWEKQAEFHEELTVELKKEIRDIIIFYQRRLKSQKGLISFCEFEKREVVVEEDGRKKNKTVGCRVIPRSHPLFQEFKIWQTLNDIEVFAWDKQSKRKKADKSSILFDNSEDALLVEGKRFLYQEEKELLAKELFVKESMKKAEVLKLLFENYQELDLNFKQIDGNHTGFALFSAYSKMIEKYGYEPVDFKRSADEIIEKLETIFTNLGWNTELLSIDLSKEDKELERQSYFRLWHLLYSFEGDNTPTGNGKLLEKIMQLCDVEKEYAVELANVSFQEDYGSLSAKAIKKILPYLKEGNQYDVACDYAGYRHSRSSLTKDEIENKILKDKLEILPKNSLRNPVVEKILNQMVNLINTLIDTYGKPDEIRVELARELKKNAKEREELTKSIARNTREHDEIRQLLRTEFGMMNVSRNDIIRYKLYEELKDNGYKTLYSNEYIPREKIFSKEIDIEHVIPQARLFDDSLSNKTLEYRAINIEKGNKTAYDFVKEKYGNDGLEKFLNRCETLFKDKRTKLRKLKMEEKDIPEGFIDRDLRNTQYISKKAFAMLNEISRRVVATTGSITDKLREDWQLVDLMKELNLPKYEKLGMVEMFEDKDGRKIKKITDWTKRNDHRHHAVDALTVAFTKDVFIQFYNNKNAAWMPASKEHANITGIKARYFENGKALAPMPLAQFRAEAKRHLENLLVSIKAKNKVITSNVNRTKNKNGENRKLQQTPRGQLHLETVYGSHRQYATKIEKVNAAFDVTKIATVSKLAYRNALLKRLEAFGNDPKKAFTGKNTLEKNPLYLDENQTEMVPEKVQTVEFETVYTIRKPIDPNLSIDKVVDVKIRSVLEKRLKEYGGDAKKAFVNLDENPIWLNEAKGISIKRVSIRGISNAQSLHEKKDKDGNLILGKEGRKIPVDFVNTGNNHHVAIYKKPVLDKVGQVVLDEEGNPKYELDEVVVSFFDAVTRANLGQPIIDKDYRRSEGWQFLFSMKQNEYFVFPNDKTGFNPKEVDLLNPENYALISPNLFRVQKFAYKNYVFRHHLETTIKDTSSTLKGITWTDFRSSKGLDKIVKVRVDHIGQIVSIGEY

SEQ ID NO: 85 - protein, 1329 aa, Catenibacterium mitsuokai
IVDYCIGLDLGTGSVGWAVVDMNHRLMKRNGKHLWGSRLFSNAETAANRRASRSIRRRYNKRRERIRLLRAILQDMVLEKDPTFFIRLEHTSFLDEEDKAKYLGTDYKDNYNLFIDEDFNDYTYYHKYPTIYHLRKALCESTEKADPRLIYLALHHIVKYRGNFLYEGQKFNMDASNIEDKLSDIFTQFTSFNNIPYEDDEKKNLEILEILKKPLSKKAKVDEVMTLIAPEKDYKSAFKELVTGIAGNKMNVTKMILCEPIKQGDSEIKLKFSDSNYDDQFSEVEKDLGEYVEFVDALHNVYSWVELQTIMGATHTDNASISEAMVSRYNKHHDDLKLLKDCIKNNVPNKYFDMFRNDSEKSKGYYNYINRPSKAPVDEFYKYVKKCIEKVDTPEAKQILNDIELENFLLKQNSRTNGSVPYQMQLDEMIKIIDNQAEYYPILKEKREQLLSILTFRIPYYFGPLNETSEHAWIKRLEGKENQRILPWNYQDIVDVDATAEGFIKRMRSYCTYFPDEEVLPKNSLIVSKYEVYNELNKIRVDDKLLEVDVKNDIYNELFMKNKTVTEKKLKNWLVNNQCCSKDAEIKGFQKENQFSTSLTPWIDFTNIFGKIDQSNFDLIENIIYDLTVFEDKKIMKRRLKKKYALPDDKVKQILKLKYKDWSRLSKKLLDGIVADNRFGSSVTVLDVLEMSRLNLMEIINDKDLGYAQMIEEATSCPEDGKFTYEEVERLAGSPALKRGIWQSLQIVEEITKVMKCRPKYIYIEFERSEEAKERTESKIKKLENVYKDLDEQTKKEYKSVLEELKGFDNTKKISSDSLFLYFTQLGKCMYSGKKLDIDSLDKYQIDHIVPQSLVKDDSFDNRVLVVPSENQRKLDDLVVPFDIRDKMYRFWKLLFDHELISPKKFYSLIKTEYTERDEERFINRQLVETRQITKNVTQIIEDHYSTTKVAAIRANLSHEFRVKNHIYKNRDINDYHHAHDAYIVALIGGFMRDRYPNMHDSKAVYSEYMKMFRKNKNDQKRWKDGFVINSMNYPYEVDGKLIWNPDLINEIKKCFYYKDCYCTTKLDQKSGQLFNLTVLSNDAHADKGVTKAVVPVNKNRSDVHKYGGFSGLQYTIVAIEGQKKKGKKTELVKKISGVPLHLKAASINEKINYIEEKEGLSDVRIIKDNIPVNQMIEMDGGEYLLTSPTEYVNARQLVLNEKQCALIADIYNAIYKQDYDNLDDILMIQLYIELTNKMKVLYPAYRGIAEKFESMNENYVVISKEEKANIIKQMLIVMHRGPQNGNIVYDDFKISDRIGRLKTKNHNLNNIVFISQSPTGIYTKKYKL

SEQ ID NO: 86 - protein, 1152 aa, Roseburia inulinivorans
MNAEHGKEGLLIMEENFQYRIGLDIGITSVGWAVLQNNSQDEPVRITDLGVRIFDVAENPKNGDALAAPRRDARTTRRRLRRRRHRLERIKFLLQENGLIEMDSFMERYYKGNLPDVYQLRYEGLDRKLKDEELAQVLIHIAKHRGFRSTRKAETKEKEGGAVLKATTENQKIMQEKGYRTVGEMLYLDEAFHTECLWNEKGYVLTPRNRPDDYKHTILRSMLVEEVHAIFAAQRAHGNQKATEGLEEAYVEIMTSQRSFDMGPGLQPDGKPSPYAMEGFGDRVGKCTFEKDEYRAPKATYTAELFVALQKINHTKLIDEFGTGRFFSEEERKTIIGLLLSSKELKYGTIRKKLNIDPSLKFNSLNYSAKKEGETEEERVLDTEKAKFASMFWTYEYSKCLKDRTEEMPVGEKADLFDRIGEILTAYKNDDSRSSRLKELGLSGEEIDGLLDLSPAKYQRVSLKAMRKMQPYLEDGLIYDKACEAAGYDFRALNDGNKKHLLKGEEINAIVNDITNPVVKRSVSQTIKVINAIIQKYGSPQAVNIELAREMSKNFQDRTNLEKEMKKRQQENERAKQQIIELGKQNPTGQDILKYRLWNDQGGYCLYSGKKIPLEELFDGGYDIDHILPYSITFDDSYRNKVLVTAQENRQKGNRTPYEYFGADEKRWEDYEASVRLLVRDYKKQQKLLKKNFTEEERKEFKERNLNDTKYITRVVYNMIRQNLELEPFNHPEKKKQVWAVNGAVTSYLRKRWGLMQKDRSTDRHHAMDAVVIACCTDGMIHKISRYMQGRELAYSRNFKFPDEETGEILNRDNFTREQWDEKFGVKVPLPWNSFRDELDIRLLNEDPKNFLLTHADVQRELDYPGWMYGEEESPIEEGRYINYIRPLFVSRMPNHKVTGSAHDATIRSARDYETRGVVITKVPLTDLKLNKDNEIEGYYDKDSDRLLYQALVRQLLLHGNDGKKAFAEDFHKPKADGTEGPVVRKVKIEKKQTSGVMVRGGTGIAANGEMVRIDVFRENGKYYFVPVYTADVVRKVLPNRAATHTKPYSEWRVMDDANFVFSLYSRDLIHVKSKKDIKTNLVNGGLLLQKEIFAYYTGADIATASIAGFANDSNFKFRGLGIQSLEIFEKCQVDILGNISVVRHENRQEFH

SEQ ID NO: 87 - protein, 686 aa, Coprococcus comes
MKKQDSPKNNMGYTAYNLNVLGYEEFAKRVELLFKDTDAVKRLNDSHMQMAEGFDLNALPGSPALRRGVSQAIKVLDDIVSVAGKAPDRIYLKVTRTASNSRKGKRTAKRSDKIKQALKALDADAAADLGAAKLLRELGMFDEKEINERIYLYFHQAGKCLYTGKPIDITRIASNDYYVDHVVPLAYRKDESLDNKVLVYAEASRYKSETLLVSPAVQRKMLPFWRMLRNAGLMSERKLNALIRTEISEGMLKSIIGRQFTENSWEAKLFTAAIAAKYPGTVVIPVKAGVIGAVRSRIGIPKSLKANQFYHAHDALLAAEVGRYMELAKPAFVHNRVKYEQYMRKIKLVNEENKKAPKSQLDFFAGGFFFDRVDKDTGEVYWNKDEEVERIYRACGWKNLRVTYAAFEDGGAFWKQTIYSPREKSKLIATKSDRPAEIYGGYSSQTFANFFVYEVMKKKVKQLRFGAVPAAIASKSDPDTYNAMLEMYARGLAKTAKEKFVRIVRARVLKNTMIELYGERFRIAGEKQVYPVRQMPLAIDEVYLLKGVETIAAAGNAGASAKIDFEKAAESLVGFWDLLLEKLPVNYPKLTVQLKLGLLKHPKDILAATSESEFPAIVYKIAEAEIQVMEQASGLRNMSDTKILGGNTFGGSLVFTFNKVLNDPKSKACFIDTTPAGLYEVKTKIW

SEQ ID NO: 88 - protein, 1105 aa, Actinomyces coleocanis
MDNKNYRIGIDVGLNSIGFCAVEVDQHDTPLGFLNLSVYRHDAGIDPNGKKTNTTRLAMSGVARRTRRLFRKRKRRLAALDRFIEAQGWTLPDHADYKDPYTPWLVRAELAQTPIRDENDLHEKLAIAVRHIARHRGWRSPWVPVRSLHVEQPPSDQYLALKERVEAKTLLQMPEGATPAEMVVALDLSVDVNLRPKNREKTDTRPENKKPGFLGGKLMQSDNANELRKIAKIQGLDDALLRELIELVFAADSPKGASGELVGYDVLPGQHGKRRAEKAHPAFQRYRIASIVSNLRIRHLGSGADERLDVETQKRVFEYLLNAKPTADITWSDVAEEIGVERNLLMGTATQTADGERASAKPPVDVTNVAFATCKIKPLKEWWLNADYEARCVMVSALSHAEKLTEGTAAEVEVAEFLQNLSDEDNEKLDSFSLPIGRAAYSVDSLERLTKRMIENGEDLFEARVNEFGVSEDWRPPAEPIGARVGNPAVDRVLKAVNRYLMAAEAEWGAPLSVNIEHVREGFISKRQAVEIDRENQKRYQRNQAVRSQIADHINATSGVRGSDVTRYLAIQRQNGECLYCGTAITFVNSEMDHIVPRAGLGSTNTRDNLVATCERCNKSKSNKPFAVWAAECGIPGVSVAEALKRVDFWIADGFASSKEHRELQKGVKDRLKRKVSDPEIDNRSMESVAWMARELAHRVQYYFDEKHTGTKVRVFRGSLTSAARKASGFESRVNFIGGNGKTRLDRRHHAMDAATVAMLRNSVAKTLVLRGNIRASERAIGAAETWKSFRGENVADRQIFESWSENMRVLVEKFNLALYNDEVSIFSSLRLQLGNGKAHDDTITKLQMHKVGDAWSLTEIDRASTPALWCALTRQPDFTWKDGLPANEDRTIIVNGTHYGPLDKVGIFGKAAASLLVRGGSVDIGSAIHHARIYRIAGKKPTYGMVRVFAPDLLRYRNEDLFNVELPPQSVSMRYAEPKVREAIREGKAEYLGWLVVGDELLLDLSSETSGQIAELQQDFPGTTHWTVAGFFSPSRLRLRPVYLAQEGLGEDVSEGSKSIIAGQGWRPAVNKVFGSAMPEVIRRDGLGRKRRFSYSGLPVSWQG

SEQ ID NO: 89 - protein, 1361 aa, Anaerococcus tetradius
MGNYYLGLDIGTNSVGWAVTDENYNIERFKKKNMWGIRLFDEAKTAESRRIHRQARRMRQRKIQRLNLLMELFDVEISKVDESFFIRKKESDLHYEDKSQDSRYALFNDKEFNDKDYHNKYPTIFHLIMDLIENDEKKDIRLLYLACHYLIKNRGHFIFEGQKFDVNSSLNNNINKLKSHLDQFYNICLDFDNDKLIEILVNQNLNISEKSKKIKELLRKTNLEVGIANLIAGGSIKLSNMFDDDELKNLDYNSLSFKNSNFDEGRELFEEVLEDRFELVEILKDIHDASVLETMLSSASISPDGGKYISSSMINSYNKHKRDLKLLKKIIKKYKKSEYDNIFRDENIKNNYLSYTRTGINKNKKVQAEDNTDSDGFYKYIVKILKDIKENDSDEDIKYILSEIDKKNFVPKQRTKENSVIPYQLREIELRKIIDNQSKYHKFLNEVDEKGISVKEKIISLLTFRIPYYIGPLNPSYNEEKNFTTSWVKRLAKGKVTPWNFEDMVDIDASREAFIENKLNKCSFLLDETVLPKDSLLYQEYMVLNELNNLKINGQSINTDLKKSIYEELFKKYKKVTRKRLISYIKEKENMSGDIVITGIDGDFKQGLKSYIAFKDIIGEKIDDDIYRKEVEKIIRDISLYGDDKSFIQKKIKNENKLDLSDDQISKIAKLKFKDWGRFSKKLLVGIKASDKNTGEIDNIIGFMRNYNYNIMQLMANVFTFKDEIEKLNSKYYTDEKINIDYLDDLYLSSPAKRMLWQSFQIVDEIKNIKNSDPKKIFIEMARSKEDKPTRKMSRKSRLEKLYTDSKKQFIKLFGPDEYDKLNNEIKNKSESDFRWDNLYLYYTQFGRCMYSLDPIDLEELSNKNLYDQDHIYPKSKIYDDSIENRVLVKKQLNLDKSNEYPIPDRVLNKDKNKLLAFWKMLNEKELIGDKKYARLIRKSPFTDEELGDFIARQLVETRQATKETANMLKRLCPDSKIVYVKAKNVSDFRRKFDILKCRSINDLHHAHDAYLNIVVGNVFDTKFTSNPLNFIKNNSKNRSYNLEKIYDYDVIRNEKIAWLAERKEENQDGSIATVLKNLSKNDIRVTRRTYIKCEDLFDENIVRKGNGKFPIKENNNKSDTNKYGGYSGIKNAYFVLLEDEKHNRILEAIPSFIYKKEKNGEKGSVINYLQNILGIKSAKILRDKIKIGSLLKIDKFPYNLAGKSGNGILISGGVQLILDKNTSKYIKKIENYKYKLDENKDYQINIFDKLSKEENIKLFDLFVDKFENSIYKNRVNIKLKEIKLARPKFEHLSIEEQIKTLTQMLILFGRENNAVNLEYIGLPKNTGKTKINKKINNKDIKIINQSITGLYETEEDLANI

SEQ ID NO: 90 - protein, 1377 aa, Lactobacillus brevis
MESNHDGEQVKYTLGLDIGTSSIGYAAIDKHQKPIRAKGKHVIGVRLFQEGQTAADRRAFRTTRRRLKRRKWRLNLLNRLFDPYLSEVDPNFLPRLRQSNLSPKDDNKHFNGSTLFPDKTDAAFYRQYPTMYHLRYALMTEKRKFDIREVYLAIHHIVKYRGNFLNSATVDSFKTSNIDFTSQFDRLNELYRQVILDEPFQINMDQVDEMTNKLLDNDALKLDTQKQVAKLLPVIYNDKPIDKQYTRIATEFSKAILGYKTKLDVILNLDTQNAKDWVIRLDDEDIDDKLPALVENLDESRQEIVTIIRDLYAQITLNAIVPKGKSLSESMVDKYNDHKDHLDLLMGLIHELGDDSAKGIKLREAYTQYVGKSDDKTLNQDDFYAAIKKNLDEDSKRSPKIQRLIEQASFMPKQRTSANGVIPHQLHQLELDRIIENQGRYYPFLKKPNPNTHKPNGGKYKLDELVAFRIPYYVGPLITKRDQEKTSGADFAWMIRKPGQEGEITPWNFDQKVDRMASANRFIRRMTTKDSYLVAEDVLPDASLIYEKFKALNELNMLKVNDSRLSPSQKQDLFNNLFKKQKTIRTKKLQTYIRTNWELPSVMISGLADPDKFNSSLSTYIDFRDIFGEKVDDPNRQADYEEIIEWSTVFEDRKIYQAKLNQLDWLTEPQRKALLTKRYTGWGRLSKKLLTGLKDQNGDSILDQLWKTNDNFMQIQSRDEFAKQIHDENAKQFHEANNVDDILDDAFTSPQNKKAIRQVDKVVQDVVKAVGYAPDKIAIEFTRSLENNPQRTVSRQRQLQAAYKNIPREIMKSGLMAELGSVADSKKVLSDKLYLYFTQMGKDMYEDKTINIDNLPNYDIDHILPQAFIKDDSIDNRVLISKEENARKSNRVPLKFFGAKRMGFWKDLLNNGLISNRKFQNLTTDPEKISKYSAKGFIHRQLVETSQVIRLVANILGNEYSQAGTTIIEVSAKMNRQLREDFHLIKNRNVNDYHHAMDAYLTAYVGDYLYLRYPKLRPYFVYGDFKKAEDQDLNIRNFNFLHDLKDNESLDKIVDSETGEIVWEKHGSVKQLKKVYHYKFMLVSQEVYTRQDALFNQTIYPASDADKRKLIPIKNSKPVDVYGGYSGNIDAYMAIVRVHGKKEDNYKVVGIPMRAVTKLKKAEKEGHDSYLNAVHEVLKPQFTKKKKNRKTGEITETVDEFDVLLGKVYYRQLIVDGNKKFMLGSSSYQYNAKQLVLSDKAMQVLSKNGKVKSQDENQNLIDVYDEILEKVDQYFELYDQRHYRESLHKGRGIFVNLPLSNQYDGSKLTSYGKYETIDAILNGLHANATMSNLRYLGISSPFGKMQASNGLTIDPDSIICYQSPTGLFERQIKLSDL

SEQ ID NO: 91 - protein, 1239 aa, Lactobacillus buchneri
MTEKRKFDIREVYLAIHHIVKYRGNFLNSATVDSFKTSNIDFTSQFDRLNELYRQVILEEPFQINMNQVDKMTNKLLDNDALKLDTQKQVAKLLPVIYNDKPVDKQYTRLATEFSKAILGYKTKLDVILNLDTQNAKDWAIRLDDEDIDDKLPALVENLDESRQEIVTIIRDLYAQITLNAIVPKGKSLSESMVDKYNDHKDHLDLLMGLIHELGDDSAKGIKLREAYTQYVGKSGDKTLNQDDFYAAIKKNLDEDSKRSPKIQRLIEQASFMPKQRTSANGVIPHQLHQLELDRIIENQGRYYPFLKEPNSNTHKPNGGKYKLDELVAFRIPYYVGPLITKQDQEKTSGADFAWMIRKPGQGGEITPWNFDQEVDRMASANTFIRRMTTKDSYLVAEDVLPDSSLIYEKFKVLNELNMLKVNDRRLSISQKQDLFNNLFKKQKTIRTKKLQTYIRTKWELPSVMISGLSDPDKFNSSLATYIDFRDVFGEKVDDPNRQADYEKIIEWSTVFEDRKIYQAKLNQLDWLTESQSKALLTKHYTGWGRLSKKLLTGLKDQNGDSILDQLWKTNDNFMQIQSRDEFAKQIHDENAKQFHEANNVDDILDDAFTSPQNKKAIRQVDKVVQDVVKAVGYAPDKIAIEFTRSPQDRPQRTFSRQRQLQSTYLNVAKALMKSNLNQELKSVIDSQQTLTDKLYLYFTQLGQDMYTGKEINFDELVNYQIDHILPQAFIKDDSLDNRVLVSAPINNAKSDNVPVKKFGAKMGYFWKQLAENHLISKRKLNNLTTDPDKIGKFTAQGFIHRQLVETSQVIRLVANILGNEYGHDGTTIIEVTAKMNHQMRKDFDLIKIRDVNDYHHAMDAYLTAYVGDYLYLRYPKLRSYFVYGDFKKLKDQSLKIRNFNFLHDLTNDEAGDKIVDQETGEIIWDKHESVKQLKKVYHYKFMLVSQEVYTRQDALFNQTIYPASDADKRKLIPIKNNKPVDVYGGYSGNVDAYMAIVRIHGKKEDKYKVVGVPMRAVADLKKAESKGRDNYLNAVHEVLKPQFTKKKKDRKTGEITEMMDDFDVLLGKVYYRQLIVDGNKKFMLGSSTYQYNAKQLVLSDKAMQVLSKDDKLKNQDENQNLIDVYDEILEKVDQYFELYDINKFRQKLHDGRKKFIELPVDNDFNGKKLISYGKRATIISILNGLHANATMSNLKYLGISSPFGMLQVPNGIILSPASRICYQSPTGLFERKVKLSDL

SEQ ID NO: 92 - protein, 1381 aa, Lactobacillus fermentum
MDYVKEYHIGLDIGTSSIGWAVTDSQFKLMRIKGKTAIGVRLFEEGKTAAERRTFRTTRRRLKRRKWRLHYLDKIFAPHLQEVDENFLRRLKQSNIHPEDPAKNQAFIGKLLFPDLLKKNERGYPTLIKMRDELPVEQRAHYPVTNIYKLREAMINEDRQFDLREVYLAVHHIVKYRGHFLNNASVDKFKVGRIDFDKSFNVLNEAYEELQNGEGSFTIEPSKVEKIGQLLLDTKMRKLDRQKAVAKLLEVKVADKEETKRNKQIATAMSKLVLGYKADFATVAMANGNEWKIDLSSETSEDEIEKFREELSDAQNDILTEITSLFSQIMLNAIVPNGMSISESMMDRYWTHERQLAEVKEYLATQPASARKEFDQVYNKYIGQVPKEKGFDLEKGLKKILSKKENWKEIDELLKAGDFLPKQRTSANGVIPHQMHQQELDRIIEKQAKYYPWLATENPATGERDRHQAKYELDQLVSFRIPYYVGPLVTPEVQKATSGAKFAWAKRKEDGEITPWNLWDKIDRAESAEAFIKRMTVKDTYLLNEDVLPANSLLYQKYNVLNELNNVRVNGRRLSVGIKQDIYTELFKKKKTVKAGDVASLVMAKTRGVNKPSVEGLSDPKKFNSNLATYLDLKSIMGDKVDDNRYQMDLENIIEWRSVFEDGEIFADKLTEVEWLTDEQRSALVKKRYKGWGRLSKKLLTGIVDENGQRIIDLMWNTDQNFMQIVNQPVFKEQIDQLNQKAITNDGMTLRERVESVLDDAYTSPQNKKAIWQVVRVVEDIVKAVGNAPKSISIEFARNEGNKGEITRSRRTQLQKLFEDQAHELVKDTSLTEELEKAPDLSDRYYFYFTQGGKDMYTGDPINFDEISTKYDIDHILPQSFVKDDSLDNRVLVSRAENNKKSDRVPAKLYAAKMKPYWNQLLKQGLITQRKFENLTMDVDQNIKYRSLGFVKRQLVETRQVIKLTANILGSMYQEAGTDIIETRAGLTKQLREEFDLPKVREVNDYHHAVDAYLTTFAGQYLNRRYPKLRSFFVYGEYMKFKHGSDLKLRNFNFFHELMEGDKSQGKVVDQQTGELITTRDEVAKSFDRLLNMKYMLVSKEVHDRSDQLYGATIVTAKESGKLTSPIEIKKNRPVDLYGAYTNGTSAFMTIIKFTGNKPKYKVIGVPTTSAVGLKRVGKPGSESYNQELHRIIKSNPKVKKDFEIVVPHVSYSQLIVDGDCKFTLASDTYQHPATQLVLSKESMEIIADDFKFVKENPATADEQLVRVFDEIVNQMNHYFTIFDQRSNRQKVTKARDKFVSLPTESEYEGAKKTQVGKTEVITNLLMGLHANAAQGDLKVLGLSTFGFFQSSGGLNLSEDAMIVYQSPTGLFERRICLKDI

SEQ ID NO: 93 - protein, 1306 aa, Sphingobacterium spiritivorum
MKHILGLDLGTNSIGWALIKQNFENKQGEILGMGSRIIPMGAELSKFEQGQAQTKNANRRIARGTRKLNKRYKQRRNKLIYILQGLGMLPDQIKLVNQFSDPNKLDKISILPISKNQQQLTAFDLLELRVKALTEKIELEELGKVIYKYNQLRGYSGGNSEPEKEENNEDESEENEKTNDSFVVFSKVLSLGLPEEITFKGKKLSKRKIAIETEDGIIEAETFLDSLKENDSLELHVNIRRAKSGDTITIKLPSKTSWRKKMENIEKQLADKSKELGREYFISELLFDILKENKWAKIRNNVILRSRYESEFDAVWSEQSKYYPILNHLETDRLQKILEFIFPGQKESQEKLRQTGLKEGLKYVIKNQVVFYQRELKDQSDLISNCRYEPTEKVVAKSHPVFQEYKIWEQINKLVINTKIENGVNRKGEIRYKYIDKPIPVALKEWLYEELQSKKEVSFNPILTKLKKEFKLRENVDFLNGMNAKDKLKGNETKVILQKALGELWNIFGLDDSERQVELWEILYNGKGNEYDLTSERTSNILAFIEKYSPDLENKNDVAIKISKIKFSRNYSNLSLKAIDNILPLVRAGKFFDQNFSEALSHKIVKLLNENVEDPFEKSAQEFLDKNQDVLSDGGIVNAIATILVYDKHTAKEYSGDELIKEFTQISRLKQGELRNPLAEQIINEALVIVRDIWRKYGFKPDEIRVELARELKNNAVERGKMYSANLKSQKHNAEIRNKLIELKQEISIANIEKYKLWVSQENLQEVYLKNYNDPSKSEIEKLKLWESQGHISPYTGQPISLSELFNRERYDVDHIIPQSRYFDDSLSNKVICEKSINNEKGNRTSMEYFEVGSVNYRIFTKDQFIDHANKYFSGKKRKNLLATSIPEDPIQRQIKDTQYISIRIREELNKIVGNENVKTTTGGITDYLRNHWGLTDKFKVLLKERYEAVLPKIAQLEYDNYKKETEKKFTEYKNADVEFNEPILDEEIFIEKFRSEFIRKKNNKLIIKGWSKRIDHRHHAMDALVIACTQPAHIKRLNDLNQVLKEWLDKNKEKFFPGFSGTKTELLDEVLNLEEEKRREIFNQLEKFRAIEMPWKGFPEEAEQKLKEVIVSHKPKDKLLLQYDIQGNKQIKLRGQLHEGTLYGLSNGKEIYRIPINKLAGKQFATEKTIEKIVNPFLKNVIEEHLKSFGKKEEAFSAEGILDLNKKLAERKDEQQNPKPHPPISTIKIYYKDPSKSKKKKTDDEDDISLQKLNRKKSFNDSLYVKTGDNYLFAVMEKEVFNKKLNKDKTERHYDLKLFLTLLIF

SEQ ID NO: 94 - protein, 1358 aa, Acidaminococcus sp.
MGKMYYLGLDIGTNSVGYAVTDPSYHLLKFKGEPMWGAHVFAAGNQSAERRSFRTSRRRLDRRQQRVKLVQEIFAPVISPIDPRFFIRLHESALWRDDVAETDKHIFFNDPTYTDKEYYSDYPTIHHLIVDLMESSEKHDPRLVYLAVAWLVAHRGHFLNEVDKDNIGDVLSFDAFYPEFLAFLSDNGVSPWVCESKALQATLLSRNSVNDKYKALKSLIFGSQKPEDNFDANISEDGLIQLLAGKKVKVNKLFPQESNDASFTLNDKEDAIEEILGTLTPDECEWIAHIRRLFDWAIMKHALKDGRTISESKVKLYEQHHHDLTQLKYFVKTYLAKEYDDIFRNVDSETTKNYVAYSYHVKEVKGTLPKNKATQEEFCKYVLGKVKNIECSEADKVDFDEMIQRLTDNSFMPKQVSGENRVIPYQLYYYELKTILNKAASYLPFLTQCGKDAISNQDKLLSIMTFRIPYFVGPLRKDNSEHAWLERKAGKIYPWNFNDKVDLDKSEEAFIRRMTNTCTYYPGEDVLPLDSLIYEKFMILNEINNIRIDGYPISVDVKQQVFGLFEKKRRVTVKDIQNLLLSLGALDKHGKLTGIDTTIHSNYNTYHHFKSLMERGVLTRDDVERIVERMTYSDDTKRVRLWLNNNYGTLTADDVKHISRLRKHDFGRLSKMFLTGLKGVHKETGERASILDFMWNTNDNLMQLLSECYTFSDEITKLQEAYYAKAQLSLNDFLDSMYISNAVKRPIYRTLAVVNDIRKACGTAPKRIFIEMARDGESKKKRSVTRREQIKNLYRSIRKDFQQEVDFLEKILENKSDGQLQSDALYLYFAQLGRDMYTGDPIKLEHIKDQSFYNIDHIYPQSMVKDDSLDNKVLVQSEINGEKSSRYPLDAAIRNKMKPLWDAYYNHGLISLKKYQRLTRSTPFTDDEKWDFINRQLVETRQSTKALAILLKRKFPDTEIVYSKAGLSSDFRHEFGLVKSRNINDLHHAKDAFLAIVTGNVYHERFNRRWFMVNQPYSVKTKTLFTHSIKNGNFVAWNGEEDLGRIVKMLKQNKNTIHFTRFSFDRKEGLFDIQPLKASTGLVPRKAGLDVVKYGGYDKSTAAYYLLVRFTLEDKKTQHKLMMIPVEGLYKARIDHDKEFLTDYAQTTISEILQKDKQKVINIMFPMGTRHIKLNSMISIDGFYLSIGGKSSKGKSVLCHAMVPLIVPHKIECYIKAMESFARKFKENNKLRIVEKFDKITVEDNLNLYELFLQKLQHNPYNKFFSTQFDVLTNGRSTFTKLSPEEQVQTLLNILSIFKTCRSSGCDLKSINGSAQAARIMISADLTGLSKKYSDIRLVEQSASGLFVSKSQNLLEYL

SEQ ID NO: 95 - protein, 653 aa, Oribacterium sinus
MELINSEEFTFKEELEKHTQVAMKQLSEFTYEDLEDSYFSVPVKRMIWQTLLVVREIEKVMGYAPKRIFVEMTRTEEEKGDKGRKESRGNQLLELYKSIKNTDSHNWKEEIAAADKDGKLRSKKLFLYYMQMGRDMYTGEEIDLGRLYDDNLYDIDHIYPRHYVKDDSIMNNLVLVNRRANQDIKKDLYPIPEQIKANPNVHMLWDALHKQKLITDEKYARLTSNTAFSEKQLGDFIARQLVETGQGTKGVADLLEQLFKDTVIVYAKASNVSDFRRDNGFLKSRLVNDFHHAQDAYLNIVVGNVYYTKFTKNPWNFICKDYEKDKEKNRYNLARMFDWNVVRGSETAWIVERKDEKGTISTVRKMMQKNTPLLTRMNFEQHGSIANATLYSAKKAKSENYLPLKTADEKMSDVKKYGGYTSMSIAYYFIVHHKEDKKENVTIEALPLYCKDKVEREENGLEKYCEEVLGYGEVNIIRRKLKIQSLLEFNGYQVHLSGKTGNQLILRNAISLCLSTKWITYIKKLEKAVNIQIVEEVVTPEENIKLYNLLADKHANTVYSKRPNAYGEKLLADREIFVTLEFGKQCEALLQILSLTKIGSTEANLLLIGESEHSGKILISKNLKASDRPAVINQSPCGLYEKKEWIFDKIVEK

SEQ ID NO: 96 - protein, 1436 aa, Capnocytophaga gingivalis
MKYIKYILGLDIGSNSIGWALIQLDLLQKTKRIIAAGSRIIPMDQKVLSDFGKGITISPTAQRTSYRNARHCRERHLLRRERLHRVLHILGFLPTHYDKQIDFSKRYGKFVDNTEPKIAYNEGKFLFMDSFQEMLSDFKSHQPDLFYTKKNGEESKIPYDWTIYYLRKKALSQKISKEELAWIILNFNQKRGYYQLREEEGNKENDFEIISSKIISVIKKDKDKKYNKYWYDIILENGLVYQAAFYNDFVYNWINQDREFIIERTSLKNGAEKVKLSYLPTFDEIDKMDKKEQDKYYKKIKIKTENSIGNKTVGCYIYDHILQNPNEKIKGKLVRTIERKYYKEELKAILEKQIALQPELFTDQLLADCIRELYSKNEAQQRNLAARDFVHLLVEDIIFYQRPLRRQKSTLANCSLESRSYIDKDSHTRKEAPLKVCPKSNPYYQEFRVLQWLQNLKIYEIDSDQEVTHQFIKTLEDKQQLFEFLMAQKEIDCEELLKYFLNQTYPNAKEKALKSELKKWKDTYRWNYVYDIGEKSSKKYPMNETRYELKRHLEKVANLPDDFLSSEVEYLLWHLIYSVKDKVAYEKGLKKFAQKHHLDKDSFVESFKKFNPYPSEYGSFSEKAIRKLLPLMRFGAHWDFNHIDKNTQKRIEDLITGVENEEIRTILREKAEKYQLEKETDFQDLPLWLAQYIVYNRHAEASSLEKWTSVNDLETYLNEFKQHSLRNPIVEQVVMETLRVVRDIWQQYGQGQASFFNEIHIELGRELKKTAKEREKLSKQNQKNEDINLSIKEKLKELEKYNTRAYSITHQEKYKLWLEQKHISPYTGQIISPENLFTDNYEIEHIIPQSRFFDDSLSNKVVCESIVNKAPYKDRQLGLEFIKNQGGRIVKELSKENKTIKIFTEEQYRTFIKEHYSNNPEKTKKLLLEEIPEKMVARQMNDTCYISKFISEILSKIVRSDEQDEGVHSKNVILCTGKITSILRQDWGLNDIWDNLILPRFERMNNLLQKEKFTIYSIEKQKKIPVVPINDQFKSFQKKRIDHRHHAMDAIIIACTTREHINYINNQHALEKEKDKKEKQEERDKLREKLCIKKYNNRSEGNYSWIFKKPWDTFTQEVRVALEDIVVSFKQNLRVINKATNYYERWVEENGKYIKKMVKQEGTNWAIRKPLHEETISGKIYLDREKITKNDILTATRKTVDSSFDDKRIKKITDTGIQKILLNYLKYKGSPEIAFSPEGLEELNKNLSIYNDGKPHKPIYKVRIYEKGSGRFALGEKGRKYKKYVQGASNLYFGIYQGAKRSFATIPLNEVIERQKQGLPSVPEYNEKGDLLLFSLSPNDLVYVPIEGEIIENIDFRNLSKEQKERIYNVNDFSSTCYFTPNRIAKAIFPKEVDLQRKGDKLSGSYDTKTASLEGIQIKEVCIKLKVDRLGNISKA

SEQ ID NO: 97 - protein, 1069 aa, Bacillus cereus
MNYDIGLRIGITSCGWSIINKDLERIEDLGVRVFEKAENPDGTASAAPRREARKSRRKHRRKKHRIERIKRLIVQHDLLSKKELDSLYLSPFNIDVWNLQVEALERKLDNREFARVLIHLVQRRGFQTIRKSVEIQEEGKLLENVSENERIMKVNGYKTVGEMFSKHEKFTHHKRNKDGSYTSVVTRSLLLKEIKTIFNSQRILGNVFSTQKLESDYLYIWGSQRPTLTYEQLMSMVGNCIYEKKEKRAPKTSWAFQYFSLLQKINKLKVSDDNTLRKLSKEERDIVIELAFKKKNVSFVDIRKALKLNDNTKFNHLTYSHVVETKKVEKATFIELKGYHLIKKQLKDRNVELTQELQPKDYDAIAAASTFFKNDIEFRDYLRNQYLDSNGKRKSNIANKVFEDKVIAAVFELNFSKVCHLSFKSLYKLIPHLEKGLDYKEAILCAGYNFRDENKRDKKLFLPVIQQETNPVVHRALTQARKVINAIIREYGSPNTIRFVVANDLAKTYKQRKELESTLKKNRAENEKIKTKLLSMGIINPTGMDIVKYKLWYEQSGICLYTGRQMELSSLFKPGYSIVNHIIPYNRSFDDTYHNRVLTLTETKYEKGNKIPFEYFGAEETCWNEYEKRVSTSKKIHDKKREKLLIRNFDIEYENEMISNNVFDTHYIGSYFEKYIDEHLQFKKSTKKQKVFSIHGNMVAHLHSRWGFNKNSREIYLNHAVDAAIVAVLTDQLIRNIADYYRRDNILEQKGSLKFPEPWKSFSIELEARISPQVRDLIKKLNLDSYLDVDILHIKPVFISKKPRRKVNGEAHKSTIRSLIGINEIGKTVTCIKTRLEDIPFDENGDFPMYGKDTDKYTYTAIKERYLEFNKDKEKAFSTPLYKLKRNGEPGNQIKSVKIIDTRNIVNKVNQGKGIAYNSNIIRVDVFSRDQKYYVVPIYLRDFIKGSLPNKIITAAKGFMQWPETDNSYTFLFSIFPNDLIKVVPKEGKFIKAKNENKENINLTEILGYFKGLDSSTGAFTLESHDGSLLARGIGTKNLLLIEKYQVDVLGRYNKVGNEERQDIKIQQN

SEQ ID NO: 98 - protein, 1391 aa, Lactobacillus jensenii
MKEIKDYIIGLDIGTNSCGYVVTDKQNNILKLKGKTAIGARLFKEGEAAADRRAFRTTRRRLARRRWRLSLLEEIFDEEMNKVDPSFFRRLKESDYSPKDRRKQFNSIVFESSEADKAFYEKYPTIYHLRNALMHDNQKHDLREIFLAVHHIVKYRGNFLREDSVKAFKAAKFTLQGEDGIGPVDKLNDLLKEIYIEAAPELATDNLSKIEDIIKDKKLYKQDKLKQIANLLPKAVDSKDKAKLNKDIAKQVANALMGYMFRLDTLFSFTDVDVKDYKLKFSDANIDESLDALTSLLTDAQIEFVLELQSIYNTIVLNEIVPDGMSLSESMVKKYDDHKKDLKLYKEYIDSLSDQKKAKQLEAAYALYVNYRKADLLAAKKLFEKKKIGDKKFVDVISNFEVFGKFVSDNLDDSELANKIKARLDLGEFLPKQRTNQNGVIPYQLHQVELTQILEKQGKYYPFLITPNPVESHRNNAPYEISELVSFRVPYYVGPLIDNQSIKDKQNKNKFAWMVRQKQGQITPWNFEEMVDTTESANQFIKRMTRKDTYLLAEDVLPKSSLIYQKFMILDELNRIKIDGKKLTSKLKHDIFEKLFKKQKSINLDNLKNYLLAEGNIPGLIEGLSDGINFNNSFSTYIDYRNIFGDEIDNPNKQADFEKMIEWSTVFEDRKIFKRKLKEITWLTPEQIKQVSSKRYSGWGRLSKKLLTQITDENGVNILQRLWNEPETLTEVLANPVIKRKISEANSLFVQINKVENILDDAYTSPQNKKAIRQVIRVVDDIIAAAHGKKPSQIAIEFARSSQNKAKVPDTRKKQLDKIYNKISSEILDSSIKNELKNLKSNKYLSKDKLFLYFKQMGRDAYTGDKLSLDQLQNYDIDHIFPRSFIKDDSLDNRVLTQKPINAKKSDYGIPALEFGNKYVPDLGITVKEMWKLWQENGLISKSKLINLCTNPKKIGSKRASGFINRQLVETSQVIKLVAIILQAEFPDTEIIEVKALQNTTLRESFHLYKNRSVNDYHHAIDAYLTTIVGNYLYQVYPKLRPYFVYGQFKKFNQEKNIDILKRLKNFNFLRQLIFNTDDNIYISGTKEIVFNKKDIIHKLETAYGYKYMNISRECYQETSSLFNQTLYAHNSSVKNSLIPKKKGLPTEIYGGYSGNKDSFFVLVKIVKKRTNLYRIVGIPTRELAKLNSSNNYNQALNKIVESKLCLKETESFKILIKRLLYGTLIVDNGQKFRIGSFKEKHNVQQLVLQLKSMKYIKFYIDGGQNYFTDVERKKLEKQDRDKCLLYVFDDIMNVVNKRFTLFDMSKYEKDGDSLREKFNCLDFNDKVSILSDLLKAFHANSDRTSITKLKITNLGRHQAGKNGITLTTNAQIIYQSPTGLFERRIKIKDL

SEQ ID NO: 99 - protein, 1114 aa, Eubacterium rectale
MNYTEKEKLFMKYILALDIGIASVGWAILDKESETVIEAGSNIFPEASAADNQLRRDMRGAKRNNRRLKTRINDFIKLWENNNLSIPQFKSTEIVGLKVRAITEEITLDELYLILYSYLKHRGISYLEDALDDTVSGSSAYANGLKLNAKELETHYPCEIQQERLNTIGKYRGQSQIINENGEVLDLSNVFTIGAYRKEIQRVFEIQKKYHPELTDEFCDGYMLIFNRKRKYYEGPGNEKSRTDYGRFTTKLDANGNYITEDNIFEKLIGKCSVYPDELRAAAASYTAQEYNVLNDLNNLTINGRKLEENEKHEIVERIKSSNTINMRKIISDCMGENIDDFAGARIDKSGKEIFHKFEVYNKMRKALLEIGIDISNYSREELDEIGYIMTINTDKEAMMEAFQKSWIDLSDDVKQCLINMRKTNGALFNKWQSFSLKIMNELIPEMYAQPKEQMTLLTEMGVTKGTQEEFAGLKYIPVDVVSEDIFNPVVRRSVRISFKILNAVLKKYKALDTIVIEMPRDRNSEEQKKRINDSQKLNEKEMEYIEKKLAVTYGIKLSPSDFSSQKQLSLKLKLWNEQDGICLYSGKTIDPNDIINNPQLFEIDHIIPRSISFDDARSNKVLVYRSENQKKGNQTPYYYLTHSHSEWSFEQYKATVMNLSKKKEYAISRKKIQNLLYSEDITKMDVLKGFINRNINDTSYASRLVLNTIQNFFMANEADTKVKVIKGSYTHQMRCNLKLDKNRDESYSHHAVDAMLIGYSELGYEAYHKLQGEFIDFETGEILRKDMWDENMSDEVYADYLYGKKWANIRNEVVKAEKNVKYWHYVMRKSNRGLCNQTIRGTREYDGKQYKINKLDIRTKEGIKVFAKLAFSKKDSDRERLLVYLNDRRTFDDLCKIYEDYSDAANPFVQYEKETGDIIRKYSKKHNGPRIDKLKYKDGEVGACIDISHKYGFEKGSKKVILESLVPYRMDVYYKEENHSYYLVGVKQSDIKFEKGRNVIDEEAYARILVNEKMIQPGQSRADLENLGFKFKLSFYKNDIIEYEKDGKIYTERLVSRTMPKQRNYIETKPIDKAKFEKQNLVGLGKTKFIKKYRYDILGNKYSCSEEKFTSFC

SEQ ID NO: 100 - protein, 1362 aa, Lactobacillus paracasei
MTKLGKPYGIGVDIGSNSIGFAAVDENSHLIRLKGKTVIGARLFEEGKAAAKRRAGRTTRRRLSRNRWRLSFLRDFFESHITPTDPNFFMRQKYSEISPKDKARYKYEKRLFNDRTDAEFYQQYSTMYHLRNRLMTDPSRADVREIYFAIHHILKSRGHFLTPGDAKDFNTNDVALDEIFPALQDAYAQVYPDLGITFDEDKANEFKTILLNEIATSIDTQRALVKLLLAEEDDKDILKQQKQVLTEFAKAVVGLKTKLNLALGTEVDSSEATAWNFSLGQLDDKWAGIESAMTDEGTEILDQIRDLYRARLLNGIVPTGKTLSQAKVDDYTQHHEDLQLFKAYLKQLEDDGTAKAIRQLYDRYIDGDDAAPFLRENFVKALTKDVTAHPNTKSPELLERLAQPDFMLKQRNKANGAIPVQMQQRELDQIIKNQAVYYDWLAAPNPVEKHRKSMPYQLDELLNFRIPYYVGPLVTAKEQKAAQGGVFAWMVRKDPEGNITPYNFDEKVDREASANTFIQRMKTTDTYLIGEDVLPKQSLLYQRYEVLNELNNVRVNNEKLSIEQKQQVIRELFERHNSVTIKQFAENLRAHGDYAHIPEIRGLADEKRFLSSLSTYRQLKSLLPEAIDDPAKQADIENIIAWSTVFEDAAIFKTKLKEISWLGSEAITKLSNIRYRGWGQFSRKFLNGLTLGNGHTIIQELLLSTNNLMQILTDETLQKKMTELNADKLKTANINDAIDNAYTSPSNKKALRQVLRVVDDIKRAADGQDPSWLYVETADGGGTPGKRTRARQHQLQEIYANAAHELIDTAVRGELEDKISDKADFNDRLVLYFMQGGRDIYTGAPLNIDQLSSYDIDHILPQSLIKDNSLDNRVLVHAIINREKNATFASTIYAQKMNATWRQWHEAGLISGRKLRNLQMRPDQIDKYASGFVARQLVETRQIIKLTEQIVAAQYPDTKIIAVKAGLSHQLREELEFPKNRDVNHYHHAFDAFLAARIGTYLLKRFPNLQAFFTYGKFTKADVKKLRGFNFIRDITHAEDKIVAKDTGEVVWDKQRDVDELDRIYNFKRMLITHEVRFETADLFKQTVYGARDSKEAGGSKQLIPKKKGYPVDIYGGYFRENTAYLAVVKVTKKTETIFKVVKIATSQVAALNKARSRSTAEELSVLTELLKPKFSKVGKNGKITDTPFEVVLPRVPREQLFYNAKYGFFMVNSDTMFHNFQEIWVSRSDQKILQQIRKAKIDYPNVDQDLDNLFHNLADQIVKYFDLYSIAGFKEKISQSQNTFNDLAVDDTDQSVGKITVINELLKGAQANGMTGSLKVLKISTPFGFTQDKSGVLTKDSSIIYQSPTGLFERSVRLTDL

SEQ ID NO: 101 - protein, 1056 aa, Actinobacillus minor
MKALNYILGLDLGIASVGWAVVEIDQNELPIRLIDLGVRTFERAEVPKTGDSLALARRLARSSRRLVRRRAVRLLKAKRLLKQEGILQADDFHSSHLKPLPNNPWELRVKGLNHLLDRKEWAAVLLHLLKHRGYLSQRKNESKTDNKELGALLKGVSENRQLLQAQAFSTPAEIAIKKFQQEEGHIRNQRGAYSHTFDRNDLLAELRLLFQKQREFNNPYTSQSLEQAIAELLMWQKPALSGEAILKMLGKCTFEPSEYKAPKNSYSAEYFVWLTKLNNLRILENGADRGLTAEERQLLINQPFEKAKFTYAQARKLLELSDLAIFKGVRYGKDNAESATLMEMKAWHAIRKALESNGLKTEWNGLKTKPELLDKIGTAFSIYKTDEDISQYLNGELSPAVLNALLENLSFDKFIRLSLQSLAKILPLMEQGLRYDEACKQVYGDHYGKKEQLELRFLPKIPVEDIRNPVVLRTLSQARKVINGVVRLYGSPARIHIETGREVGKSFSERRDISKRQEENRNERQRAVEKFKEFFPHFVGEPKAKDILKMRLYEQQHGKCLYSGKELDLNRLLEKGYVEIDHALPFSRTWDDSFNNKVLVLASENQNKGNQTPYEWLNGKENAERWKLFQALVNGSRFPYSKKQRILTKYLDEDGFRERNLNDTRYVARFLCNFIEDNMQLVGQGKKRVFASNGQITALLRRSWGIQKVREDNDRHHAVDAVVVACSTRALQKKITDYVRYKEMNVFTGEKIDQETGEIIKFHFPEPWKFFRQEVEIRVFSETPAEDVVIALPDRPQANHEFIQPLFVSRAPTRKMTGQGHMETIKSAKRLAEGLSVSRVPLTQLKLKDLENMVNREREKALYEALKVRLEKFNNDPAKAFADPFYKKGGQQVKAVRVEQVQKSGVLVRQENGVADNASMVRVDVFIKGGKYFLVPIYTWQVAKGILPNRAATQGKEEEYWDIMDETAIFQFSLYQNDLIKLVTKKKTIFGYFNGLNRATSNINIKEHDLDKSKGKDGIYLEVGVKLALSLEKYQVDELGKNIQPCRSMKKRPPVR

SEQ ID NO: 102 - protein, 1081 aa, Neisseria flavescens
MTAFKPNPINYILGLDIGIASVGWAMVEIDEEENPIRLIDLGVRVFERAEVPKTGDSLAAARRLARSVRRLTRRRAHRLLRARRLLKREGVLQAADFDENGLIKSLPNTPWQLRAAALDRKLTPLEWSAVLLHLIKHRGYLSQRKNEGETADKELGALLKGVADNAHALQTGDFRTPAELAVNKFEKESGHIRNQRGDYSHTFSRKDLQAELVLLFEKQKEFGNPHISDGLKEGIETLLMAQRPALSGDAVQKMLGYCTFEPTEPKAAKNTYTAERFIWLTKLNNLRILEQGSERPLTDTERATLIDMPYKNKLTYAKARELLGLDDTAFFKGLRYGKDNAESATLMEMKAYHAIRRALEKEGLKDKKSPLSLSPELQDEIGTAFSLFKTDEDITGRLKGCLQPEILDALLKHINFDKFVQISLKALRRIVPLMEQGKRYDEACAETYGDHYGEKNSEEMLYLPPIPADEIRNPVVLRALSQARKVINGVVRRYGSPARIHIETAREVGKSFKDRKEIEKRQEENRKDREKAAAKFREYFPNFVGEPKSKDILKLRLYEQQHGKCLYSGKAIDIRRLNGKGYVEIDHALPFSRTWDDSFNNKVLVLGSENQNKGNRTPYEYLNGKDNSREWLEFKARVETSRFPHSKKQRVLLQKFDEKGFKERNLNDTRYVNRFLCQFVADHMQLTGKGKRRVFASNGQITNLLRGFWGLHKVRAENDRHHALDAVVVACSTVAMQQKITCFVRYKEMNAFDGKTVDKETGEVLHQKTHFPQPWEFFAQEVMIRVFGKPDGKPEFEEADTPEKLRALLAEKLSSRPEAVHEYVTPLFVSRAPNRKMSGAHKDTLRSAKRFVKHNEKISVKRVWLTEIKLADLENMVNYKNGREIELYEALKARLGAYGGNAKQAFDPKDNPFYKKGGQLVKAVRVEKTQESGVLLNKKNAYTIADNGDMVRVDVFCKVDKKGKNQYFIVPIYAWQVAENILPDIDCKGYRIDDSYTFCFSLHKYDLIAFQKDEKSKVEFAYYINCDSSNGRFYLAWHDKGSKEQQFRISTQNLVLMQKYQIDELGKEIRPCRLKKRPPVR

SEQ ID NO: 103 - protein, 1392 aa, Gemella haemolysans
MANKTWYLGLDIGSASVGWAATDTGYKIIRKNKKRLWGVRLFEEAKTAEDRRGYRSSRRRLARRKWRLNLLEELFTSEVKKVDENFFLRLKESQYHYEDKTHKVPYAIFNDKDYTDKDYYKDYPTIYHLRSKLMTEENPDIRKVFLAIHHIIKNRGHFLLQGQSFKDGNLNNLIKELLELDILHVGFEVTEEVVDKIADISLEKKTSKDKLNDIKELYPKEKQLLEVFRLIFGGKTSLDKLFAIDEYKELDAAIKSVSFKEKIYEEVRHDYEQVLSNYIELLDLAKLVYDSIILSDIKKEGKTLSESKVELFEKHRDDLLKLKNLVKNDSKLSEDKKVELYALIFKEDKDKGTNYVNYIRKSEEGKGCNYEDFKKFLVKELAKLEESSVKTEIIKDLELEQFLPLQRTKDNSVVPYQIHKEELVKILDNAARYHSFLNEKDESGYNVREKVIQLLEFRIPYYVGPLNSSKKAKEGGFAWSVRNTGYENTPVTPWNYSKVIDESASAEKFITNLTNKCTYLKGEDVLPKSSLLYSEFALLNELNALKYDGNRISLEARNTIIEKLFKQQGKKVTKTSIKNLLKAEGYIDGKGEITGIDITVKNDLKSYRDFKKILGNKFNSEHVENIILWITLYGESRKLIKAKIESVYGEVYSKDEITKMSRLVYKDWGRFSRKLLTELVSKKLYNEETGECLNIIGAMRQNNILFMELLADRFDYSKQIVEFNKELQEDVTEIAPEILDDLYVSPAVKRSIWQTVRIVEELKKIIGCAPAKIFVETTRSNQEKKKPTDSRKKQLELAYKAVKKDVKELEKEIGTINFDVLNDRLSSVEPSKLKAKKLYLYYTQLGRCMYSEEPINISELFDNNKYDIDHIYPQSKIKDDSFTNTVLVKRESNAAKTDRYPLGSDIQTPSNRRFWKFLKEKGLISDEKYNRLVRTEEFSDEELSGFIARQLVETSQSVKAVASILGELNPETSICYSKAENVSSFRQNFGKIKKGDRDSKNNDQLIKVREINDYHHAKDAYLNVVVGNVYDTKFTRNVFNFIKDKKDGRKYSLNKVFYENVSDSKTVAWEMDKTIHQVEKVMNNNNIMVTRRTSEQKGGLFDATVYKAKVAAKAKDGVYYPLKTSNSVVKDVAKYGGYTSIGIAYYSIFEYTIVNKKGEEKITRIIPIPIYISQNIKDSTALIEFGKSQIFCRAYEKIKDFKLLYRKLCIGSKININNYQYYIGGKSDERFYYDSAIQVTLDKKSEKYLKILSKYQNWKKENKDGELWENITKENNIELYNKLVEKMNSEIFTKKKSNKYNELNSEEIRNNFIKISVEEQAKVLLEILNLLTNKKSIFDLKSIDIKAARGKISFNLTSLIQFSIIEQSITGFYEKEITIIGDKGNDMENNNS

SEQ ID NO: 104 - protein, 702 aa, Helicobacter pullorum
MRKILKIDERIQFKEVDYTAKNPENKKFVEFKNLKKFCEILGAIVGDRALADSIARDMTLIKDEEELAQKLRGYGKFSQEQITQLSALHFSHHISLSLKALSEILPFMREGMRYDEACQEAKLQAKHNDKKSKFLPPFCESIYADELTNPVVHRAIAEYRKILNALIAKYGSVHKIHIELTRDVGKNFQEREKYKKEIESNYKARVQAMQECEKLGLTLSEGNILKLRLFREQNEICVYSGRKITLANLKEQGALEIDHILPYSRSSDDSYMNKVLVFTNENQNKGNKTPYEAFGGDSQKWGEIESLALRSGYPKKKAKRILDKGFGDREAGFKSRNIVDSGYIARLIANYTKEYLKFLPLDSHENTALIAGEKDSKIHVEAVKGMLTATMRHFWGLGSKNRYEHTHHAVDAIIIAYINAAMIQRFSQFRQNQESLKARFYAKELAKEEFKTQRAFFEPFSGFREQVLAKVGQIFVSRPPRKRARGALHEETFYSIDDKKLSETYGGKKGVQRALSLGKIRQIGTKIVANGPMVRVDIFKHTQSGRFYAVPIYTMDFALGILPNKAVVSGKDKDRIIKDWLEMDSCYEFCFSLFKDDVIEVQKRDMEKPELAYFVSLDASDGRIKVRHHCNDITKINENQKKLFSEAIEKEVVGRGSIQNLKVFKKYKVSPLGEIKEAKYEPRQPIALKTSPKKHRKQNNAQ

SEQ ID NO: 105 - protein, 1371 aa, Streptococcus dysgalactiae
MDKKYSIGLDIGTNSVGWAVITDDYKVPSKKFKVLGNTDRHSIKKNLIGALLFDSGETAEATRLKRTARRRYTRRKNRIRYLQEIFSSEMSKVDDSFFHRLEESFLVEEDKKHERHPIFGNIVDEVAYHEKYPTIYHLRKKLADSTDKADLRLIYLALAHMIKFRGHFLIEGDLNPDNSDMDKLFIQLVQTYNQLFEENPINASRVDAKAILSARLSKSRRLENLIAQLPGEKRNGLFGNLIALSLGLTPNFKSNFDLAEDAKLQLSKDTYDDDLDNLLAQIGDQYADLFLAAKNLSDAILLSDILRVNSEITKAPLSASMIKRYDEHHQDLTLLKALVRQQLPEKYKEIFFDQSKNGYAGYIDGGASQEEFYKFIKPILEKMDGTEELLAKLNREDLLRKQRTFDNGSIPHQIHLGELHAILRRQEDFYPFLKDNREKIEKILTFRIPYYVGPLARGNSRFAWMTRKSEETITPWNFEEVVDKGASAQSFIERMTNFDKNLPNEKVLPKHSLLYEYFTVYNELTKVKYVTEGMRKPEFLSGKQKEAIVDLLFKTNRKVTVKQLKEDYFKKIECFDSVEISGVEDRFNASLGTYHDLLKIIKDKDFLDNEENEDILEDIVLTLTLFEDKEMIEERLKKYANLFDDKVMKQLKRRHYTGWGRLSRKLINGIRDKQSGKTILDFLKSDGFANRNFMQLINDDSLTFKEAIQKAQVSGQGHSLHEQIANLAGSPAIKKGILQSVKVVDELVKVMGHKPENIVIEMARENQTTQKGQKNSRERMKRIEEGIKELGSQILKEHPVENTQLQNEKLYLYYLQNGRDMYVDQELDINRLSDYDVDHIVPQSFIKDDSIDNKILTRSDKNRGKSDNVPSEEVVKKMKNYWRQLLNAKLITQRKFDNLTKAERGGLSELDKAGFIKRQLVETRQITKHVAQILDSRMNTKYDENDKLIREVKVITLKSKLVSDFRKDFQFYKVREINNYHHAHDAYLNAVVGTALIKKYTKLESEFVYGDYKVYDVRKMIAKSEQEIGKATAKRFFYSNIMNFFKTEITLANGEIRKRPLIETNEETGEIVWDKGRDFATVRKVLSMPQVNIVKKTEVQTGALTNESIYARGSFDKLISRKHRFESSKYGGFGSPTVTYSVLVVAKSKVQDGKVKKIKTGKELIGMTLLDKLVFEKNPLKFIEDKGYGNVQIDKCIKLPKYSLFEFENGTRRMLASVMANNNSRGDLQKANEMFLPAKLVTLLYHAHKIESSKELEHEAYILDHYNDLYQLLSYIERFASLYVDVEKNISKVKELFSNIESYSISEICSSVINLLTLTASGAPADFKFLGTTIPRKRYGSPQSILSSTLIHQSITGLYETRIDLSQLGGD

SEQ ID NO: 106 - protein, 1007 aa, Helicobacter canadensis
MKVLGFDIGINSIGWAFVENNELKDCGVRLFTKAENPKTKESLALPRRNARSSRVRLRRRRSRLLSLKHIISKEFGLHYEDYIALDGNLPKAYTGKIESIYKLRYEALSQAISKEDLARVILHIAKHRGYMNKNQKTSQDSEKGAILSAIKENSNKIKHYQTAGEYFYKELFENLRDGTKEFKNIRNKAMKNEKTGNMESTYYNTILASDLEKELKLILEKQQAYHNYSDTFIKEVLEIAFYQRPLKDFSHLVGSCTFYENEKRACKNSYSAWEFIALGKIINTLESIKKDTGEIFSNEIITQILKEVLDKGSLSYTKLRKMINLDEKVKFKGLKYDKEGVEKTNLIEFKKLKEFKKALGEHNLERKTLDEIATHITLTKDENQLKKQLEQYALSQNQIDALAELDFNDHINLSFKALYEILPLMEKGKRYDEACNELGLKAKTSNQKSEFLPAFCDSIFAQELTNPIVNRAISEYRKVLNRLLKKYGKMHKIHIELARDAGLSKEARNKIEKEQKENKDINDKAEKTCKEFGLKPNAKNILKIKLWREQGEICAYSGKKITIDDLKEDKALEVDHIYPYSRSYDDSYNNKVLVFIKENQLKLNQTPYEAFGSNQEKWSKIQVLAQKLPYKKKNRILDENFKNKDQIEFISRNLNDTRYATSLIAKYTKEYLEFLPLSDDEDISLKSGEKGSKTHVQTMNGMLTSVLRHAWGFSQKDRNNHLHHALDAIIIAYSTNSIIKAFSDFKKNQEILKAKLYAKKLTSEEYKNQSKFTGFEKYRSKILEKLDSIFVSKPPNKNTKGALHEQTFYSYQDILEEYKTQEGLKRALECGKVRKIGTKYVVNDRMVRLDIFKKDNKFYGIPIYTMDFALGVLPNKVVTIGTDKDKIKKEWKTIDETYEFCFSLYKGDLVLIQKKEMQESEFAYYNGFDISSASISLEKHDNKFENLTENQKLLFPKAKEGDVEVRGIGIQGLKVFKKYMVTPLGEIQETRTEARQNIQPRKKHGLR

SEQ ID NO: 107 - protein, 1397 aa, gamma proteobacterium
MTKNYISPIAIDLGAKFTGVALYQYLEGADCTQEVAKGLLVDDRGNVTWSQEGRRGKRHQVRGYKRRKMAKRLLWLILDSEYGIKREEVTEPLLKFINGLLNRRGYTYISEEVDEESMNVSPLPFSEMMPDYFNSSAPLLEQLAKLLSDKNKLVRFRAEGKIPSNKNEFKKLLDTALDGKYKDEKKELSEAWGNILIASENVLKSTVDGHKSRSEYLANIKEDIKSNEELEKQISSKEIDGFYNLVGHLSNFQLRLLRKYFNDPNMSGVSYWDEKRLEKYFYQWVQGWHTKGGTDEAEKKNIILKTKGAPLLKTLKSLSADLTIPPYEDQNNRRPPKCQSVLLSDEKLTMHYPKWKEWVGQLVKQNDNAYLNENVTLANALHRIVERSRSIDPYQLRLLISITDAEKRNDLAGYKRLKLSLGSEVDEFLLLVKNIVDETKEAREGLWFETENKLFFKCGKTPPRKEKLKSTLLSAVLGKNLSDDEQSSFIEEFWKSGTPKIERRNVRGWCRLASQVQKTYGVYLKEYGLQQLHKLEAGKKLDDKPLALLYKNSGLIASKIGEALNIEPDEVSRFASPHSLAQIFNIIEGDVAGFNKTCRACTYENIWRMQEEKVESLLTNQLLSEIHGERKVPLKSAMCTRLSADSTRPFDGQMASIIEHIARKIAQHKIAQINDVPKEFSIDIPIIIESNQFSFTAELEEIKRGRGSAKAKKAKELGEKSKAGWVSKTERIKTSSEGICPYTGAPLGGSGEIDHIIPRSLTGRTKKTVFNSEANLIYCSSKGNHDKGNRVYVIEQLNDKYLKKQFSTSDVNLIKKKIKTTIQRFTEGGEKLRSFSELSREDQKAFRHALFVPELKSEVTSLLAVKNITRVNGTQAWLAKKIASLLAEHLDKQGRDYTLSAHQIDPWSVSKQRKMLASAEPIWAKKDPQPAASHVVDAVCTFLEALEQPHTASRLKTISSTSFEKTGWRSALIPDLIKVDALDRRPKYRRYNIGSTSLFKDGIYAERFLPILIDENGLMAGYDIDNSLKAKGADVVFESLSPFLLFKGEEVGAQSLSDWQERIDGRYLYMSIDKVKAFDYLQEKVGEKDIAAELLNSIHFTQRKTELRAKFSDDSGKKMKTLDAIRKSLKLTVTVNEIGKRKEKCGFSGTIGIPAKSAWENLLDEPLLETYWGTKMPPQEIWEKVYRKHFPRNIPNQAHRKVRKDFSLPVVDSVSGGFRVKRKTPNGYNYQLLAIDGYSAVGFKKEGDNVDFKSPALVPQIAESKSVTPISSELVHLDKNEIVYFDEWRKIDISDSDLKQFVSSLELAPGSQNRFYIRFTVDEDQFERHFKSALRVNGIQDLDTVNKTFDWNREIPSLLIPPRSNLFLLETGQKITFEYIANGANAEVKKAYSLRRA

SEQ ID NO: 108 - protein, 1082 aa, Neisseria meningitidis
MAAFKPNPINYILGLDIGIASVGWAMVEIDEEENPIRLIDLGVRVFERAEVPKTGDSLAMVRRLARSVRRLTRRRAHRLLRARRLLKREGVLQAADFDENGLIKSLPNTPWQLRAAALDRKLTPLEWSAVLLHLIKHRGYLSQRKNEGETADKELGALLKGVADNAHALQTGDFRTPAELALNKFEKESGHIRNQRGDYSHTFSRKDLQAELILLFEKQKEFGNPHISGGLKEGIETLLMTQRPALSGDAVQKMLGHCTFEPAEPKAAKNTYTAERFIWLTKLNNLRILEQGSERPLTDTERATLMDEPYRKSKLTYAQARKLLGLEDTAFFKGLRYGKDNAEASTLMEMKAYHAISRALEKEGLKDKKSPLNLSPELQDEIGTAFSLFKTDEDITGRLKDRIQPEILEALLKHISFDKFVQISLKALRRIVPLMEQGKRYDEACAEIYGDHYGKKNTEEKIYLPPIPADEIRNPVVLRALSQARKVINGVVRRYGSPARIHIETAREVGKSFKDRKEIEKRQEENRKDREKAAAKFREYFPNFVGEPKSKDILKLRLYEQQHGKCLYSGKEINLGRLNEKGYVEIDHALPFSRTWDDSFNNKVLVLGSENQNKGNQTPYEYFNGKDNSREWQEFKARVETSRFPRSKKQRILLQKFDEDGFKERNLNDTRYVNRFLCQFVADRMRLTGKGKKRVFASNGQITNLLRGFWGLRKVRAENDRHHALDAVVVACSTVAMQQKITRFVRYKEMNAFDGKTIDKETGEVLHQKTHFPQPWEFFAQEVMIRVFGKPDGKPEFEEADTPEKLRTLLAEKLSSRPEAVHEYVTPLFVSRAPNRKMSGQGHMETVKSAKRLDEGVSVLRVPLTQLKLKDLEKMVNREREPKLYEALKARLEAHKDDPAKAFAEPFYKYDKAGNRTQQVKAVRVEQVQKTGVWVRNHNGIADNATMVRVDVFEKGDKYYLVPIYSWQVAKGILPDRAVVQGKDEEDWQLIDDSFNFKFSLHPNDLVEVITKKARMFGYFASCHRGTGNINIRIHDLDHKIGKNGILEGIGVKTALSFQKYQIDELGKEIRPCRLKKRPPVR

SEQ ID NO: 109 - protein, 1334 aa, Listeria monocytogenes
MKKPYTIGLDIGTNSVGWAVLTDQYDLVKRKMKISGDSEKKQIKKNFWGVRLFEKGETAAKRRMSRTARRRIERRRNRISYLQEIFAIQMNEVDDNFFNRLKESFYAESDKKYNRHPFFGTVEEEVAYYKDFPTIYHLRKELIDSQKKADLRLVYLALAHIIKYRGHFLIEGALDTKNTSIDEMFKQFLQIYNQVFANDIEEASLKKTEKNQEVAQILAEKFTRKDKLDKILSLYPGEKTTGVFAQFVNIIVGSTGKFKKHFNLHEKKDINCAEDTYDTDLESLLAIIGDEFAEVFVAAKNAYNAVVLSNIITVTDSTTRAKLSASLIERFENHKEDLKKMKRFVRTYLPEKYDEIFDDTEKHGYAGYISGKTKQADFYKYMKATLEKIEGADYFIAKIEEENFLRKQRTFDNGVIPHQLHLEELEAILHQQAKYYPFLREDYEKIKSLVTFRIPYFVGPLAKGQSEFAWLTRKADGEIRPWNIEEKVDFGKSAVDFIEKMTNKDTYLPKENVLPKHSLCYQKYMVYNELTKVRYIDDQGKTNYFSGQEKQQIFNDLFKQKRKVKKKDLELFLRNINQIESPTIEGLEDSFNASYATYHDLLKVGMKQEILDNPLNTEMLEDIVKILTVFEDKRMIKEQLQQFSDVLDGTVLKKLERRHYTGWGRLSAKLLVGIRDKQSHLTILDYLMNDDGLNRNLMQLINDSNLSFKSIIEKEQVSTTDKDLQSIVAELAGSPAIKKGILQSLKIVDELVSVMGYPPQTIVVEMARENQTTNKGKNNSKPRYKSLEKAIKEFGSQILKEHPTDNQELKNNRLYLYYLQNGKDMYTGQELDIHNLSNYDIDHIVPQSFITDNSVDNLVLTSSAGNREKGDNVPPLEIVQKRKIFWEKLYQGNLMSKRKFDYLTKAERGGLTEADKARFIHRQLVETRQITKNVANILHQRFNYKTDGNKDTMETVRIVTLKSALVSQFRKQFQFYKVREVNDYHHAHDAYLNGVVANTLLKVYPQLEPEFVYGEYHQFGWFKANKATAKKQFYTNIMLFFAQKDRIIDENGEILWDKRYLETVKKVLGYRQMNIVKKTEIQKGEFSNVTPNPKGKSNKLIPRKKDWDPIKYGGFDGSKMAYAIIIEYEKQKRKVRIEKKLIQINIMEREAFEKDEKTFLEEKGYHQPKVLIKVPKYTLYECKNGRRRMLGSANEAHKGNQMLLPNHLMALLYHAEKYEAIDGESLAYIEVHRALFDELLAYISEFARKYTLSNDRLDEINMLYERNKDGDVKSIAESFVSLKKFNAFGVHQDFSFFGTKIERKRDRKLNELLNSTIIYQSITGLYESRKRLDN

SEQ ID NO: 110 - protein, 1337 aa, Enterococcus faecalis
MKKDYVIGLDIGTNSVGWAVMTEDYQLVKKKMPIYGNTEKKKIKKNFWGVRLFEEGHTAEDRRLKRTARRRISRRRNRLRYLQAFFEEAMTALDENFFARLQESFLVPEDKKWHRHPIFAKLEDEVAYHETYPTIYHLRKKLADSSEQADLRLIYLALAHIVKYRGHFLIEGKLSTENISVKEQFQQFMIIYNQTFVNGESRLVSAPLPESVLIEEELTEKASRTKKSEKVLQQFPQEKANGLFGQFLKLMVGNKADFKKVFGLEEEAKITYASESYEEDLEGILAKVGDEYSDVFLAAKNVYDAVELSTILADSDKKSHAKLSSSMIVRFTEHQEDLKKFKRFIRENCPDEYDNLFKNEQKDGYAGYIAHAGKVSQLKFYQYVKKIIQDIAGAEYFLEKIAQENFLRKQRTFDNGVIPHQIHLAELQAIIHRQAAYYPFLKENQEKIEQLVTFRIPYYIGPLSKGDASTFAWLKRQSEEPIRPWNLQETVDLDQSATAFIERMTNFDTYLSSEKVLPKHSLLYEKFMVFNELTKISYTDDRGIKANFSGKEKEKIFDYLFKTRRKVKKKDIIQFYRNEYNTEIVTLSGLEEDQFNASFSTYQDLLKCGLTRAELDHPDNAEKLEDIIKILTIFEDRQRIRTQLSTFKGQFSAEVLKKLERKHYTGWGRLSKKLINGIYDKESGKTILGYLIKDDGVSKHYNRNFMQLINDSQLSFKNAIQKAQSSEHEETLSETVNELAGSPAIKKGIYQSLKIVDELVAIMGYAPKRIVVEMARENQTTSTGKRRSIQRLKIVEKAMAEIGSNLLKEQPTTNEQLRDTRLFLYYMQNGKDMYTGDELSLHRLSHYDIDHIIPQSFMKDDSLDNLVLVGSTENRGKSDDVPSKEVVKDMKAYWEKLYAAGLISQRKFQRLTKGEQGGLTLEDKAHFIQRQLVETRQITKNVAGILDQRYNANSKEKKVQIITLKASLTSQFRSIFGLYKVREVNDYHHGQDAYLNCVVATTLLKVYPNLAPEFVYGEYPKFQAFKENKATAKAIIYTNLLRFFTEDEPRFTKDGEILWSNSYLKTIKKELNYHQMNIVKKVEVQKGGFSKESIKPKGPSNKLIPVKNGLDPQKYGGFDSPVVAYTVLFTHEKGKKPLIKQEILGITIMEKTRFEQNPILFLEEKGFLRPRVLMKLPKYTLYEFPEGRRRLLASAKEAQKGNQMVLPEHLLTLLYHAKQCLLPNQSESLAYVEQHQPEFQEILERVVDFAEVHTLAKSKVQQIVKLFEANQTADVKEIAASFIQLMQFNAMGAPSTFKFFQKDIERARYTSIKEIFDATIIYQSTTGLYETRRKVVD

SEQ ID NO: 111 - protein, 1426 aa, Capnocytophaga ochracea
MKNILGLDLGTTSIGFAHIVEDENKEKSEIKELGVRIVSLTTDEQSDFEKGKSITTNANRTLKHGARLNLDRYQQRRKYLIDLLQKANLITPSSILAENGKNTTHSTWQLRAKAVTERIEKEEFARILLAINKKRGYKSSRKAKTEDEGQAIDGMAIAKRLYDENLTPGQLSLQLLQQNKKLLPDFYRSDLQKEFDLVWNFQKQFYPDILTDIFYKELQGKGKDATSKAFSKRYHFDTTENKGSKESVRLQAYQWRAEAISKQLSKEEVAYVLTEINNNLNNASGYLGAISDRSKELYFNRQTVGQYLYAKLQENRHNSLKNKVFYRQDYLDEFERIWETQASFHKELTDELKKQIRDVVIFYQRKPKSQKGLISFCEFESKEIEIEKDGKTITKNIGARVVPKSSPLFQEFKIWQILNNVICKRKGIRKKKISAKTTQLDLLNESSQTIFSLDMECKQLLFDELNLKGDLKSDKVLKLLGYSPQEWEINYNQLEGNRTQKALYEAYLKIVEMEAHDVKDILQIKSAKDDWSLDESPLSASEIREKVKAIFQTLGICTKILYFDPLLPVKEFEEQDSYQLWHLLYSYESDDSTSGNETLYRILEKKYAFKREHARILANVALQDDYGSLSTKAIRKIYPNIKENQYSTACEKAGYKHSKLSLTTEELEARELKNIIPLLKKNALRNPVVEKILNQMINVVNALIEKNSERDAEGKITKYFHFDEIRIELARELKKNAQKRYEMTQNINKAKLEHQKISEILQKEFGIKNPTKSDIIRYRLYQELEHNGYKELYTNAPIARDMLFSKNIEIEHIVPKARVFDDSFSNKTLTFHRINSDKGEYTAFDYITSLNSEEELNQYLTRVENAYKTKSISPTKYKNLLKKASEIGDDFINRDLRDTQYIAKKAKEILFQVTKNVLSTSGSITDRLREDWGLVDVMKELNMPKYQSLGLTEVEERKDGNKVTVIKNWTKRNDHRHHAMDALTVAFTKPSYIQYLNHLNARKDENNKNYSVILAIEEKETIKVPTNNGKNKRVFIEPIPNFRQVAKKHLEEIFISHKAKNKVVTKNTNKPAGTDKQQITLTPRGQLHKETIYGKYQYYINKEEKIGVKFDERTIAKVSNPVYREALLKRLQANDNDPKKAFAGKNALSKNPIYLDESKTKTLPEKVNLTYLEEDFSIRKDISPDNFKDLKSIEKVIDQGVKRILIKRLQAYDNDPKKAFVDLEKNPIWLNKEKGIAIKRVTISGVNNAQPLHIGKDHLGKTTLNKEGKEIPVDYVSTGNNHHVAIYRDKEGNLQEQIVSFFDAVVRAQQGIPIIDKTYKQAEGWQFLFTMKQNEMFVFPNATTGFNPAEIDLLDPKNKKLISPNLFRVQKIATKDYFFRHHLETNVETDNILKNVTWKREGLSGLKDIVKVRINHLGDIVSIGEY

SEQ ID NO: 112 - protein, 1424 aa, Parabacteroides sp.
MKRILGLDLGTNSIGWALVNEAETDEEVSSIIRLGVRVNPLTVDETQNFEKGKSITTNAERTLKRSMRRNLQRYKLRRDALVEFLKELGFITDETILSEQGNRTTFETCRLRAKAAEEEISLEELSRVLLMINKKRGYKSSRKVKKEEDGVLIDGMEIAKKLYEEDLTPGQLCSQLLESGKKVLPDFYRSDLQEELDRIWSVQKQFHPDVFCDAAKEEIKGKNRSQTWAILANYFVWKEEVVGWNDREAKNETIEKECKLVGLKRTTKGYELKKENYRWRAQALTEQLGLEEIAVVLQEINGQINASSGYLGAISDRSKVLYFNHQTVGQYQMAELDKNPHASLRNMVFYRQDYLDEFDRIWEKQAEFHKELTAELKKEIRDMIIFYQRRLKSQKGLISFCEFERLEIVVEKDGKKQTKVIGCKVIPRSHPLFQEFKVWQTLNDIKVLGREKKRNALSASESRALYPEEKEILARELAIKENMKKADVLKLLFENPQELDLNFKQIDGNRTGFSLFSAYSKMIEKYGYEPLDFKKPADEIIGQLRTIFTDLGWNTNLFTIDLTKEGKELEMQPYFRLWHLLYSFEGDNTSTGNGKLIEKIMQLCGVEKEYAVELASLSFQDDYGSLSAKAIKRILPYLKEGNLYDVACEYAGYRHSKSSLTKEEIENKVLKGKLEVLPKNSLRNPVVEKILSQMVNVINTIIDTYGKPDEIRVELARELKKSAKEREELTKAIAKSTREHEEIRKLLQDEFGMMNVSRNDIIRYKLYEELKDNGYKTLYSNQYIPKEKIFSKEIDIEHIIPQSRLFDDSLSNKTLEYKAINIEKGNKTAYDFVKEKYGEEGLQQYINRCESLFNDKKAKLRKLKMEQKDIPDGFIDRDLRNTQYIAKKALAMLNEICRRVVATTGSITDQLREDWQLVDVMKELNLPKYEALGFVETYEDKDGRKIKRIKDWTKRNDHRHHAMDALTVAFTKDAFIQYFNNKNAAQDSGNRNHTNIIGIKTRYFDKGRALPPIPLEQFRIEAKQHLEKLLVSIKAKNKVVTVNVNRTKKRKGENTKIQQTPRGQLHLETVYGSHKQYVTKIEKVNASFDAAKIATVSKRAYRNALLKRLETFGNDPKKAFTGKNALEKNPLYADKYQTIRVPEKVQTVEFETIYTIRKPVDPALNVDKVVDVKVRAILERRLKEYGGDPKKAFVNFWENPIWLNKEKGISIKRVSIRGINNAQSIHVKKDKNGNPIWDENGKQIPVDFVNTGNNHHVAIYRKPVLDKKGQVTFDEDGNLMYELDEVVVPFFEAVTRANLGLPIIDKDYRKSEGWQFLFSMKQNEYFVFPNEKTGFNPKEVDLLNPDNYAMISPNLFRVQTMSKVMYGNNVVRDYKFRHHLETTVKDMKELKDIAYKQYKTLSFGNSVVKIRINHIGQIVSVGEY

SEQ ID NO: 113 - protein, 1395 aa, Lactobacillus jensenii
MKEIKDYIIGLDIGTNSCGYVVTDKQNNILKLKGKTAIGARLFKEGQAAADRRSFRTTRRRLARRHWRLGLLEEIFDPEMEKIDPNFFRRLKESDYSPKDSRKQFNAIVFKSIKADKRFYKKYPTIYHLRNALMHDNQKHDLREIFMAVHHIVKYRGNFLREDSVNAFKAAKFSLRGEDGIGPVDKLNDLLKEIYSEYSPELATNNLSKIEDIIKDKNLYKQDKLKQVATLLIKEADSKDKAKLNKDIAKQVANSFMGYMFRLDTLFSLTDVDVKDYKLKFSDANIDESLDDLTSLLTDAQIEFVLELQSIYNTIVLNEIVPDGMSLSESMIKKYDDHKEDLKIFKEYIDSLSDQKKAKKLLSAYNLYVNYRKSDLVEAKNLFKNKKVGDKNFADVISNFEVFGKFVSDNLDDSELANKIKARLDLGEFLPKQRTNQNGVIPYQLHQVELTQILEKQGKYYPFLITPNPVESHRNNAPYEISELVSFRVPYYVGPLIDNQSIKDKQNKNKFAWMVRQKQGQITPWNLEEMVDTTESANQFIKRMTRKDTYLLAEDVLPKSSLVYQKFMILDELNRIKIDGKKLTSELKHDIFEKLFKKQKSINLDNLKNYLLVEGNIPGLIEGLSDGINFNNSFSTYIDYRNIFGDEIDNPNKQADFEKMIEWSTVFEDRKIFKRKLKEITWLTSEQIKQVSSKRYSGWGRLSKKLLTQITDENGVNILQRLWNEPETLTEVLANPVIKRKIVEANSSFTKAKDMKDILVEAYTSPQNKKAIRQVMRVVDDIIAAAHGKKPSQIAIEFAREDQDNPQMTKSRKAQLDQIYAKISDEFLDDAVKNELKNMKDNKPLAKDKVFLYFKQMGRDAYSGEKLSLDNLQDYDIDHIYPQSFIKDDSFDNRVLVQRAYNNGKSDNVPVLLFGNKIAAGLGITIRQMWKKWLELGLISKRKFNNLITDPEKISRNMASGFVNRQLVETSQVIKLVANILQAKLPDTEIIEVKASYNSILRKEFNLYKSREVNDYHHAIDAYLTTIVGNYLYQVYPKLRPYFVYGQFKKFGKAENQEDDPVKKIKKFNFIYQLIWGKDDAICISHTNQQVFSKKDIIDKLTTAYNFKYMNISHAVYTRNNNMFKQTLFPIIERTTAKTKSLIPKKLDRPTDIYGGYSNNNDAYLALVKVDKKRGSEYRVVGIPMRAAAMLKASKNYDEDLRKVIEPMVMFDKNGKAKRGIEGFRVLVGKMPFKQAVLDGNKKFMLTGTVDTPNLKQLVLSQQNMKYILDYIEDVDCRKHKFGDKVQNPDKCLLEVFDEIIEIVDKYFELFDSRDFREKLRNSRNKFIKLEASKKADTILAILKGLQAKSTRATIKELNISDFGRIITSSISPEAQLIYQSPTGLFERRVKVKDL

SEQ ID NO: 114 - protein, 1140 aa, Roseburia intestinalis
MRENGSDERRRNMDEKMDYRIGLDIGIASVGWAVLQNNSDDEPVRIVDLGVRIFDTAEIPKTGESLAGPRRAARTTRRRLRRRKHRLDRIKWLFENQGLINIDDFLKRYNMAGLPDVYQLRYEALDRKLTDEELAQVLLHIAKHRGFRSTRKAETAAKENGAVLKATDENQKRMQEKGYRTVGEMIYLDEAFRTGCSWSEKGYILTPRNKAENYQHTMLRAMLVEEVKEIFSSQRRLGNEKATEELEEKYLEIMTSQRSFDLGPGMQPDGKPSPYAMEGFSDRVGKCTFLGDQGELRGAKGTYTAEYFVALQKINHTKLVNQDGETRNFTEEERRALTLLLFTQKEVKYAAVRKKLGLPEDILFYNLNYKKAATKEEQQKENQNTEKAKFIGMPYYHDYKKCLEERVKYLTENEVRDLFDEIGMILTCYKNDDSRTERLAKLGLVPIEMEGLLAYTPTKFQHLSMKAMRNIIPFLEKGMTYDKACEEAGYDFKADSKGTKQKLLTGENVNQTINEITNPVVKRSVSQTVKVINAIIRTYGSPQAINIELAREMSKTFEERRKIKGDMEKRQKNNEDVKKQIQELGKLSPTGQDILKYRLWQEQQGICMYSGKTIPLEELFKPGYDIDHILPYSITFDDSFRNKVLVTSQENRQKGNRTPYEYMGNDEQRWNEFETRVKTTIRDYKKQQKLLKKHFSEEERSEFKERNLTDTKYITTVIYNMIRQNLEMAPLNRPEKKKQVRAVNGAITAYLRKRWGLPQKNRETDTHHAMDAVVIACCTDGMIQKISRYTKVRERCYSKGTEFVDAETGEIFRPEDYSRAEWDEIFGVHIPKPWETFRAELDVRMGDDPKGFLDTHSDVALELDYPEYIYENLRPIFVSRMPNHKVTGAAHADTIRSPRHFKDEGIVLTKTALTDLKLDKDGEIDGYYNPQSDLLLYEALKKQLLLYGNDAKKAFAQDFHKPKADGTEGPVVRKVKIQKKQTMGVFVDSGNGIAENGGMVRIDVFRVNGKYYFVPVYTADVVKKVLPNRASTAHKPYGEWKVMEDKDFLFSLYSRDLIHIKSKKDIPIKMVNGGMEGIKETYAYYIGADISAANIQGIAHDSRYKFRGLGIQSLDVLEKCQIDVLGHVSVVRSEKRMGFS

SEQ ID NO: 115 - protein, 992 aa, Treponema vincentii
MQKNSGEDENCGFEFLTEEEKELIKPLFFRISKPSFQFADIEKKLKGKNGFWKFNYRKDTNVSGCPVSAGLKNIFGDEASAESWKDKKVGQYDMCDIWHVLFDFDDEEKLLEFAKRKLFLSDEAAKKFCAIRIQQGYANLSLKAIRKITPFLRKGYIYSTAVFLANIPFMIGRDIFLQNEKEIEDSVKNIIGTLRDKNNIIVLANRCIESAFKDKDNDFRFEEWDKALVENSAWDLFGKKKWNEYDEEKRKTIISQVSEKVEDNLKIAVGKNPNDYKYPLLRTDDLIMDYLNQKGFVVKGELYHPSDTDYNFETPVPAEDGKIYLASPRSPSVKNPVVMRALHQLRKLVNYLIKTGKIDSTTKINVELANDVNDKNQRKAIEELAKTNEKNNADARKKIEELCNEAGFKVVPTESDIKKFRLWKEQNETCPYTGKHISFTDLFGPIPKFDFEHTIPRSLSYDDSLENLTLCDSEFNRNIKKQRLPSELPDFEEINKRFLKFYEDKIDNCLRIIELNSKSGGSYEEPAVKDLRIVKKHKAQYELNYYKEKLRRFSSTEITSGFKHSQLNDTRIITKFSLSYLKGVFDHVQPVKGSMTDTFKRQWGLMERNEIKDRSNHTHHTVDALTVACINRGKFNLLSEAIKNSSDGKHLKFPKPWETFDTDVLNAVRYIIPKYFSDESSLRQSKKILRGRDGKPVLKNGKAVFIQGATARGSLHKDTFYGCIKTVPEKGGKSEMIFVQRIPVSTLDEKVAEKIIDKRIRKTFEKNLSTGIQTLQEIQTDGILLPFKKEGRDVFVKRVRIKAHPTSPIILKKHHNVINKNPKDYKQNYYVENEENYLLAIYRGKDAKGKDVSDHKLCNLLNAVKSRQNKTGFYPDFKEKKGINLQLYKVLKIGKIVILQNDIQEDVFALPKEKLWKRMYRIAGLATSRNDIQIKLVHIIRETPWGYMKGEKDLNAGKECLLYGTANFKGLVEGQDFTVSPAGEIIQKARVC

SEQ ID NO: 116 - protein, 1340 aa, Enterococcus faecium
MKKEYTIGLDIGTNSVGWSVLTDDYRLVSKKMKVAGNTEKSSTKKNFWGVRLFDEGQTAEARRSKRTARRRLARRRQRILELQKIFAPEILKIDEHFFARLNESFLVPDEKKQSRHPVFATIKQEKSYHQTYPTIYHLRQALADSSEKADIRLVYLAMAHLLKYRGHFLIEGELNTENSSVTETFRQFLSTYNQQFSEAGDKQTEKLDEAVDCSFVFTEKMSKTKKAETLLKYFPHEKSNGYLSQFIKLMVGNQGNFKNVFGLEEEAKLQFSKETYEEDLEELLEKIGDDYIDLFVQAKNVYDAVLLSEILSDSTKNTRAKLSAGMIRRYDAHKEDLVLLKRFVKENLPKKYRAFFGDNSVNGYAGYIEGHATQEAFYKFVKKELTGIRGSEVFLTKIEQENFLRKQRTFDNGVIPHQIHLSELRAIIANQKKHYPFLKEEQEKLESLLTFKIPYYVGPLAKKQENSPFAWLIRKSEEKIKPWNLPEIVDMEGSAVRFIERMINTDMYMPHNKVLPKNSLLYQKFSIYNELTKVRYQDERGQMNYFSSIEKKEIFHELFEKNRKVTKKDLQEFLYLKYDIKHAELSGIEKAFNASYTTYHDFLTMSENKREMKQWLEDPELASMFEEIIKTLTVFEDREMIKTRLSHHEATLGKHIIKKLTKKHYTGWGRLSKELIQGIRDKQSNKTILDYLINDDDFPHHRNRNFMQLINDDSLSFKKEIKKAQMITDTENLEEIVKELTGSPAIKKGILQSLKIVDEIVGIMGYEPANIVVEMARENQTTGRGLKSSRPRLKALEESLKDFGSQLLKEYPTDNSSLQKDRLYLYYLQNGRDMYTGAPLDIHRLSDYDIDHIIPRSFTTDNSIDNKVLVSSKENRLKKDDVPSEKVVKKMRSFWYDLYSSKLISKRKLDNLTKIKLTEEDKAGFIKRQLVETRQITKHVAGILHHRFNKAEDTNDPIRKVRIITLKSALVSQFRNRFGIYKVREINEYHHAHDAYLNGVVALALLKKYPQLAPEFVYGEYLKFNAHKANKATVKKEFYSNIMKFFESDTPVCDENGEIFWDKSKSIAQVKKVINHHHMNIVKKTEIQKGGFSKETVEPKKDSSKLLPRKNNWDPAKYGGLGSPNVAYTVAFTYEKGKARKRTNALEGITIMEREAFEQSPVLFLKNKGYEQAEIEMKLPKYALFELENGRKRMVASNKEAQKANSFLLPEHLVTLLYHAKQYDEISHKESFDYVNEHHKEFSEVFARVLEFAGKYTLAEKNIEKLEKIYKENQTDDLAKLASSFVNLMQFNAMGAPADFKFFDVTIPRKRYTSLTEIWQSTIIHQSITGLYETRIRMGK

SEQ ID NO: 117 - protein, 1363 aa, Lactobacillus rhamnosus
MTKLNQPYGIGLDIGSNSIGFAVVDANSHLLRLKGETAIGARLFREGQSAADRRGSRTTRRRLSRTRWRLSFLRDFFAPHITKIDPDFFLRQKYSEISPKDKDRFKYEKRLFNDRTDAEFYEDYPSMYHLRLHLMTHTHKADPREIFLAIHHILKSRGHFLTPGAAKDFNTDKVDLEDIFPALTEAYAQVYPDLELTFDLAKADDFKAKLLDEQATPSDTQKALVNLLLSSDGEKEIVKKRKQVLTEFAKAITGLKTKFNLALGTEVDEADASNWQFSMGQLDDKWSNIETSMTDQGTEIFEQIQELYRARLLNGIVPAGMSLSQAKVADYGQHKEDLELFKTYLKKLNDHELAKTIRGLYDRYINGDDAKPFLREDFVKALTKEVTAHPNEVSEQLLNRMGQANFMLKQRTKANGAIPIQLQQRELDQIIANQSKYYDWLAAPNPVEAHRWKMPYQLDELLNFHIPYYVGPLITPKQQAESGENVFAWMVRKDPSGNITPYNFDEKVDREASANTFIQRMKTTDTYLIGEDVLPKQSLLYQKYEVLNELNNVRINNECLGTDQKQRLIREVFERHSSVTIKQVADNLVAHGDFARRPEIRGLADEKRFLSSLSTYHQLKEILHEAIDDPTKLLDIENIITWSTVFEDHTIFETKLAEIEWLDPKKINELSGIRYRGWGQFSRKLLDGLKLGNGHTVIQELMLSNHNLMQILADETLKETMTELNQDKLKTDDIEDVINDAYTSPSNKKALRQVLRVVEDIKHAANGQDPSWLFIETADGTGTAGKRTQSRQKQIQTVYANAAQELIDSAVRGELEDKIADKASFTDRLVLYFMQGGRDIYTGAPLNIDQLSHYDIDHILPQSLIKDDSLDNRVLVNATINREKNNVFASTLFAGKMKATWRKWHEAGLISGRKLRNLMLRPDEIDKFAKGFVARQLVETRQIIKLTEQIAAAQYPNTKIIAVKAGLSHQLREELDFPKNRDVNHYHHAFDAFLAARIGTYLLKRYPKLAPFFTYGEFAKVDVKKFREFNFIGALTHAKKNIIAKDTGEIVWDKERDIRELDRIYNFKRMLITHEVYFETADLFKQTIYAAKDSKERGGSKQLIPKKQGYPTQVYGGYTQESGSYNALVRVAEADTTAYQVIKISAQNASKIASANLKSREKGKQLLNEIVVKQLAKRRKNWKPSANSFKIVIPRFGMGTLFQNAKYGLFMVNSDTYYRNYQELWLSRENQKLLKKLFSIKYEKTQMNHDALQVYKAIIDQVEKFFKLYDINQFRAKLSDAIERFEKLPINTDGNKIGKTETLRQILIGLQANGTRSNVKNLGIKTDLGLLQVGSGIKLDKDTQIVYQSPSGLFKRRIPLADL

SEQ ID NO: 118 - protein, 1234 aa, Prevotella tannerae
MPNFWSIFTENLQTYLMKTRILGLDTGTNSLGWAVVDRDENNQYTPICRGDLIFTEGVKQEKGIEFSLAAERTSYRASRRHYFRRRLRKVEVLKVLVKHKLCPPLSDEALNRWHTKKEYPLDEDFILWQRTNEADNKNPYHDRHICLHRKLNLKDSQTDRYTLGRALYHLTQRRGFLSNRLDQNEEAEETGKVKSAISELSKEMKEAGCEFLGDYFYLLYRTEGNRVRIRSRYTDREKHYLQEFKEICRVQELDEDLAKALEKTIFFQRPLKSQRQGVGKCTMEKGHSRCAVSHPLYEEYRLLCYLNNIRIKTPSDDRLRPLNAEEREKITPLFYKEKNFDFEKIAKKLAGKTPFGWIRDAEDWPYQFNYRMTQEAPACPTTAQLIKVFGEDWKAALAETYTMSAKQDGTLKTEDEICTDIWNVLYSFSSKEKLKEFGLKKLQLDEVQAKAFSEIRLTRDFASLSLKAIRKILFFLRTGEDYSKAIFLANIPTIVGEEIWNDIERRSRLLYKVDLALRPQEERDAEEHRTIAERIKAAVAAEVPDAPIDLLYHPSMIEAYPDAKRNERFDCYQLGSPKTNAVRNPMAMRSLHMVRKVINHLLRKHIIDEKTEIHIEYARELNDANKRQAIADWQRELSKRHTAYAQNIRQLYKAETGLVIEPTKADILKYQLWEEQQHVCLYTGKKIGIADFLGANPKFDIEHTIPRSRGGDSTQENLTLCESKFNRDIKRDKLPTELANYEEILARIEHWKKQCYALKLKRDGIRTHSGLEKSIKDSRIRRRHLVGLEYGYLKGKYDRFTMKEVPEGFSRRQGAGIGLISKYAGLFLKSLFKDPKNPNRSNVYVVKGAITAEFRKLWGLQQADEAKSRENHTHHCIDAYTIACIGPCEYAALAAYYRSDEEFKYGRRREKPQFEKPWPTFTEDLLKLQEELLIVHQTTDKLGKRDRRKVKTPRGKFLTGGDSARGRLHQETYYGAINYDGNIKYVVRKPLDSLTEKDLDKIVDETVMGIVKGAVEAKGSLKEALADGIYMNKEKGILIKRVRIFSDVSEPINLKQLRDVSTKEYKRHIHLRKDENYLFAIYEGIDKKKNKKQTETATVDYLDAAKFYKDSKRRDKANSLVGDYSKKNKLPLKCILKKRQMVLFYEHSPEEIRFKDKKDLSRRLYIVTSIAKDGRVKFLHHQAATATGIQSSPSPFTNDGEHQPYYRLSASNIKVLVAGIDFDINILGEITPKL

SEQ ID NO: 119 - protein, 1496 aa, Prevotella veroralis
MKTILGLDLGTNSIGWAKVCVDDNGNYLRDIKLGSRIIPMSQDVLGNFDKGVTESQTSVRTGFRGVRRIRERSLLRRERLHRVLHVLGYLPPHYDSAIGWNKNEPSTYGKFLNHGEPKLAWEHKEDGSMRFLFMESFHEMMADFAKSQPSLVSDGKKIPLDWTIYYLRKKALSQPIRKEELAWLLLNFNQKRGYYQLRGEEDDDNPTKCEEYYELKVVGIEADEEGKNGNTWYNVKLENGWIYRRQSKIPLDDWIGKVREFIVTTEYEKDGITLKKDKNGDVKRSFRSPSEDDWGLRKKRTEKLLDSSKMTVGAFVYDHLLAEPSDKIRGKFIRTIERKYYKKELYAILCEQSKYHEELRSGDYLNKCAEELYKNNQPHRNSLLTKDLAYLLLEDLIFYQRPLKTKKSLIAECPYEAYKYVDKETGEIKRQGIKCIAKSNPYYQEFRLWQFISNLRLFNKADDKEVTADYLPTQDDYVRLFAYLNDRKEINQETLLKEFFKLKKITVNSEKVFPIRWNYIEDKEKKYPCNETRHELLLALDRARIDHSWLEKPGQEYRLWHLLYSVESKEETKEALRKLKDDDAFVESFLKVKPFKREYGAYSEKAIKKLLAVMRMGSLWRETDICDTTKGNITKILQGEIDEKLKEKISASVSSYNQLSDFQGLPVWLACYVVYGRHSEAAEIQHWKTPESLLAYINGFKQHSLRNPIVEQCILETLRTVHDIWKEVGHIDEIHVELGRNMKSTADQRARISENVLRNENTNLRIKSLLLELKNDPNIKDVRPYSPMQQEKLRIYEEGVLQELTKDDKDFTEITKISTMAQPSAKELQRYKLWLEQKYRSPYTGKSISLTKLFTSAYQIEHVIPQSRYFDDSFSNKVICESEVNSLKDNMLGYEFIKNHGGEIIHCTMLGDVKVLSESEYKAFVNDHYAHNKRKRENLLLEDIPQEFLNRQMNDSRYISKVVKALLSNIVRAEGEEEATSKFVVSCSGGITDRLKKDWGLNDVWNKIVYPRFERLNRLTGTEAFGQWENKDGKRVFQTAVPLELQRGFNKKRIDHRHHAMDALVIACTSRNIINYLNNESANNPKKREDLRQKLCDKNRTIRKPWETFTQDATAALEDVIVSFKNYVRIINKATNYYERYDVEGKKVIAEQRGDDMWAIRKPMHEATYYGRVNLRRKKKVNLRVALENISSICDNKLRIYINGLVEKGFNTKQILDKFKNTNDHFSMQKIDKVEIWQFTNEEEKLVATRKPLDTSFDTKKIASITDTGIQTILLNYLETKGGDSTIAFTPEGIVEMNQNISKYNNGKEHMPILKVRLYTKLGKKIPVGQTGCKAKQFVIAEAGTNLYFAIYEDEEGKRSYRTIPLNEVVERLKQGLSPVPEKNDKDVHLKFYLSPNDLVYVPIEDEHESLAKDHIYKFVDSSGTTANFIPHRSANVIFELNKKDAEKFCSGSIIQNEYGVGSSQSKNQKAITGEMIKAVCRKLEVDRLGNVIKVI

SEQ ID NO: 120 - protein, 1082 aa, Neisseria cinerea
MAAFKPNPMNYILGLDIGIASVGWAIVEIDEEENPIRLIDLGVRVFERAEVPKTGDSLAAARRLARSVRRLTRRRAHRLLRARRLLKREGVLQAADFDENGLIKSLPNTPWQLRAAALDRKLTPLEWSAVLLHLIKHRGYLSQRKNEGETADKELGALLKGVADNTHALQTGDFRTPAELALNKFEKESGHIRNQRGDYSHTFNRKDLQAELNLLFEKQKEFGNPHVSDGLKEGIETLLMTQRPALSGDAVQKMLGHCTFEPTEPKAAKNTYTAERFVWLTKLNNLRILEQGSERPLTDTERATLMDEPYRKSKLTYAQARKLLDLDDTAFFKGLRYGKDNAEASTLMEMKAYHAISRALEKEGLKDKKSPLNLSPELQDEIGTAFSLFKTDEDITGRLKDRVQPEILEALLKHISFDKFVQISLKALRRIVPLMEQGNRYDEACTEIYGDHYGKKNTEEKIYLPPIPADEIRNPVVLRALSQARKVINGVVRRYGSPARIHIETAREVGKSFKDRKEIEKRQEENRKDREKSAAKFREYFPNFVGEPKSKDILKLRLYEQQHGKCLYSGKEINLGRLNEKGYVEIDHALPFSRTWDDSFNNKVLALGSENQNKGNQTPYEYFNGKDNSREWQEFKARVETSRFPRSKKQRILLQKFDEDGFKERNLNDTRYINRFLCQFVADHMLLTGKGKRRVFASNGQITNLLRGFWGLRKVRAENDRHHALDAVVVACSTIAMQQKITRFVRYKEMNAFDGKTIDKETGEVLHQKAHFPQPWEFFAQEVMIRVFGKPDGKPEFEEADTPEKLRTLLAEKLSSRPEAVHKYVTPLFISRAPNRKMSGQGHMETVKSAKRLDEGISVLRVPLTQLKLKDLEKMVNREREPKLYEALKARLEAHKDDPAKAFAEPFYKYDKAGNRTQQVKAVRVEQVQKTGVWVHNHNGIADNATIVRVDVFEKGGKYYLVPIYSWQVAKGILPDRAVVQGKDEEDWTVMDDSFEFKFVLYANDLIKLTAKKNEFLGYFVSLNRATGAIDIRTHDTDSTKGKNGIFQSVGVKTALSFQKYQIDELGKEIRPCRLKKRPPVR

SEQ ID NO: 121 - protein, 1512 aa, Fibrobacter succinogenes
MKKILGLDLGTNSIGWAVVNADEITRDDGSRYLKPNGISAAGSRIIPMSADILGDFEKGNSISQTAERTRMRMARRLHERALLRRERLLRVLNLLDFLPKHFADKIDRYGKFTDDSEPKLAWRKNTEGKYEFIFQDAFNEMLAEFKDKQPEIVEEGKKIPYDWTIYYLRKKALEKALSKEELSWILLQFNQKRGYYQLRGEEEEIPQDKKIEYLAQKVVKVEATDQKKGDDVWYNVYLENGMIYRRTSKAPLDWEGKVKEFIVTTEVENDGETPKKDKEGNIKRSFRAPKEDDWTLLKKKTEADIENSHKTVGCYIYDSLLNNPKQKIIGKLVRTVERKFYKEELTQILKKQVELIPELRDDNLYKQCIEELYPINEAHRNTIAKTDFANLFINDILFYQRPLKSKKSQIDNCPYEERIFIDSKTGEKKKVPVKCIAKSNPLFQEFRLWQFIQNLRIYQREKEIDGKLLTDIDITSECLKSEEDYVRLFDWLNDRETIEQEDLLKHLFNTKKSKNKENPYRWNYVEDKVYPCNETRATILKGFSKCGINASVLSPELEMALWHILYSVEDKKEIETALTHFAQKQGWNDDFAKVFSKAKPFKKDYGSYSEKAIKKLLSLMRMGKYWNQDNIDKNTLDRIDKIINGEYDEKISNRVRDNAINLKDISDFRGLPVWLACYIVYDRHSEAKDCTKWNSPEEIDSYLKKFKQHSLRNPIVEQVVTETLRTVRDIWIQEEQIDEIHLELGRDLKNPADKRKKMSENILKNENTNLRIKAMLMEFMNPSMGIENVRPYSPSQQDILRIYEENALDNLTKDDKDFDFISKISKQAQPSKTDIIRYKCWLEQKYRSPYTGKTISLSKLFTPAYEIEHVIPQSLYFDDSFSNKVICEAEVNKLKDRQLGYKFIAEHHGEKVQLSQGEVVEILSVDAYEKFVKENYANNRIKMKKLLMESIPDEFIERQLNDSRYISKVVKGLLSNIVREKIDDENYEPEAVSKNLISCNGAITDRLKKDWGMNDVWNSIILPRFIRMNQITGKDCFTTTNAEGHLIPQMPLELQKGFNKKRIDHRHHAMDAIVIACTTRDHVNLLNNEAAHSKFNATRYQLQRKLRRFEKAVIDGKEREVAKEFLKPWDSFSSDSKNILENIIVSFKQNQRVINKTTNAFLHFDENGKKTFIKQGKGDSWAIRKSMHKDTVFGEINLRKVRSVSLNEAIKVPERVLNKKIKEKILELKNNKIDAKNIKKYIEENHTGGYGIDSSKIDVFYFTKETKERFFATRKTLDTSFNQAKIKDSIADSGIQKILLAHLKSKNGDAEQAFSPDGIDEMNKNIVELNNGKFHQPILKVRVYEKADKFAVGQKGNKKVKFVEAAKGTNLFFAIFEKDGKRSYLTIPLNVMIDCQKQYGNQWKNNIEAYLKEKELVEKDVKLQFILSPNDLVYLPTEGSIDKKRIYKVVSFTNNRLYAIPYAIAKSIVDKNEFTQLNKIEFTDNKESIKDACVPVIIDRLGNVIEFNGKRL

SEQ ID NO: 122 - protein, 1259 aa, Streptobacillus moniliformis
MKYILGLDLGVASIGWAVTEINEKGEPVGLIDANSVIFKPLDNDKGKLYNVERRDKRGSRRILRRKKHRVERTKMLLVNSSFLTNEEIDNLYVGKLDNIYEVRLKGLKEQLSKNEIARLMIYYCKNRGFKSNRKTEDLEILKSLGEKISEKDSDEKKLKPIIAKNTELIESKGLTPIEVIYMIRENDNSILGFKNKEGNYKFGFKRNQVIDEVRKILGTQQILSKEIVDEYIDILSSQRDFSDGPGGDSKYKIDYTKLAGKCKYTGEVRAVKSAPSYEIFTMLQKLNDIRYVKFTSEDKIEKKKLSKEVIHKLYDLVVEKNKTLTYDLIEKSIDEENIKLLNIPKLSKSKYVELRKSYFKERNDNENLTEEEINAFNEKLNNERMKQELIRNNLKAYKELKSKFKKNNIDENRIKELGGIYFLDLVAELLTYSKTDEKLEYFVENVERYSLFKEQRDIVEIIKTFPNYTKNGNLSLSLVRELNKLLMEGHDYESSLSSLNYYIDTDVDWEKFPTISEIEDSLSTKITNPNVKHILVILRKLYNTLLFKYGRPEKVHLELSRDFSNDFSTRNKIQKEQLENKVRREVAAFEMYGANKDIVAGKDRLSNDDFVRIKLWEEQNKVCMYSGRTIEKYQLTSAEVQIDHILPYSKSFDNSYSNKVLVFSNENQDKKERTPYQWLKGTEKWNEFKQRVRLNLNISNKKKENLLFEDEVVNNEFLERELHATSYSSRLALNIFQRLIPVSDEDKYDEHGNEKVKYLYNRNVIAFQGKMTSMLRNLYSLNKYTHSFESDTLDIDNKAFILKEFEINKDNLKMTAYNVNTGLEITSETKVEKNKSGEFKTIKDELLKKELDKKENLIEISDYFKDKVLFDLKIVDFEEIDTVEPEIISILYKMITALKEEVYSKNRENHLHHSLDAFLLTIMNRSMQMKLIKYNQLISVLKNKEIEIFNEEKGEYIDSKEFAEELQKQKIIDIDGNERGIKFNVNGKTHRLNLVKPYENFLDDIKNKIFDKRENNKLPYHVVKSKVSGALHAETILGESKGEITKRISVFDINYKNLGKIFDKDGSQKEIYETLVKWLEAKSKDYPKLKNGNIIKKVKIVDGNKDKLIKLGNKRYVEMGRTTVKILVLKKEAEEGLKFASIGRYKYNLLKSEKDVNISIWKDAIHFCKVRYNKLKENGYRLIHELIPGETIELELNKGNISKCLVVGFSGGKIEISSVIGDALDLINDKISTRIKERYYITVSTIKSIKKINKNILGD

SEQ ID NO: 123 - protein, 1091 aa, Mobiluncus mulieris
MDSRKYRVGIDVGTNSVGFAAVEEDDSGSPTRFLNTMVVIHDSGVDPEQKKYAITRLASAGTARRTRRLYRTRRQRLRELDDFISNELGYPLVNLENFADPYEPWKVRADLATTKLPNDELPEAMSIALRHMARHRGWRSPYQRVEALHLHAEISKEFAALKERVVEKTGDVFSDDATPAEVLVDLMGRQKVRGADGVLSGKLRQSDNANELRKIASVQGIDDETLNRIIDRVFSSKSPKGKASERVGMDALPGQGSKPRALKAMPSFQKFRVVSVICNLRIKDSGGDARPLSMEEKEKLIDYLMSSTTDDHVTWTDVADLLHVKRSQLQGTAKEGFDGERPYTRPPVNSTWSKIKDSKIKSLVALWKTGDVDVQSAIVEALSNASVLEDSRPGADIVVAYLESLDDKELESLDKVGLPAGRASYSEDSLERLTERMLRDDCDLFEARKREFNVADDWKPPADPIYAPVGNPGVDRVLKIVNRLLMAAEREWGAPTQINIEHVRSGFSSELMQREFERENERRRAQNEEAVKAILTEKGGNSRVSKYDITRYYAVKRQHCQCLYCGTPITFSDCELDHIVPRKGVGSTNTRVNLAAACRSCNRDKSNLPFAVWAGKASNFDVSIDDAVSRVKQWQRSQNEGVREFRAFQNEVISRLLKTTEDPEIDSRSLESVAWMARELHHRVEYYFQSKGAQTQVSVYRGAVTAQARKSSGLEDKVKMIGGGGKTRLDRRHHAMDAATIALMTPGISTTLSEKNNLRDAQKFTGQSETWKDYCGRTETARKHFAVWKSNMERLTDLFNDKLENDAIPVVQPLRLRLSNSKAHDDGIGKLDSKKLGSVWSLADIDRAATPQIWTALTRCDDFDPTKGLPENANRVIRAQGVKYESEDNIPVFPSNVAAIAVRDGYAEIGSTIHHARIYRIDDGKKTFYSMIRVFAVDLLKHQAEDLFTVKLPPSAISIRTCEDSLRRALSNGTAEYLGWLVPGDEIIVDTSDKAFHTGQIGDLLRNFPVNSFRLTGFPSNSRLRLKPVLLAGEGLRDDAEDSIKKILLGQGWRPAINVLFSKGKPRIVRRNSLGIERPSSNNGLPFSWEA

SEQ ID NO: 124 - protein, 872 aa, Candidatus Parvarchaeum
MLGSSRYLRYNLTSFEGKEPFLIMGYYKEYNKELSSKAQKEFNDQISEFNSYYKLGIDLGDKTGIAIVKGNKIILAKTLIDLHSQKLDKRREARRNRRTRLSRKKRLARLRSWVMRQKVGNQRLPDPYKIMHDNKYWSIYNKSNSANKKNWIDLLIHSNSLSADDFVRGLTIIFRKRGYLAFKYLSRLSDKEFEKYIDNLKPPISKYEYDEDLEELSSRVENGEIEEKKFEGLKNKLDKIDKESKDFQVKQREEVKKELEDLVDLFAKSVDNKIDKARWKRELNNLLDKKVRKIRFDNRFILKCKIKGCNKNTPKKEKVRDFELKMVLNNARSDYQISDEDLNSFRNEVINIFQKKENLKKGELKGVTIEDLRKQLNKTFNKAKIKKGIREQIRSIVFEKISGRSKFCKEHLKEFSEKPAPSDRINYGVNSAREQHDFRVLNFIDKKIFKDKLIDPSKLRYITIESPEPETEKLEKGQISEKSFETLKEKLAKETGGIDIYTGEKLKKDFEIEHIFPRARMGPSIRENEVASNLETNKEKADRTPWEWFGQDEKRWSEFEKRVTSLYSKKKISERKREILLNKSNEYPGLNPTELSRIPSTLSDFVESIRKMFVKYGYEEPQTLVQKGKPIIQVVRGRDTQALRWRWHALDSNIIPEKDRKSSFNHAEDAVIAACMPPYYLRQKIFREEAKIKRKVSNKEKEVTRPDMPTKKIAPNWSEFMKTRNEPVIEVIGKVKPSWKNSIMDQTFYKYLLKPFKDNLIKIPNVKNTYKWIGVNGQTDSLSLPSKVLSISNKKVDSSTVLLVHDKKGGKRNWVPKSIGGLLVYITPKDGPKRIVQVKPATQGLLIYRNEDGRVDAVREFINPVIEMYNNG

SEQ ID NO: 125 - protein, 1229 aa, Pediococcus acidilactici
MGDRKYNLGLDIGTSSIGFAAVDENNQPIRVKGKTAIGVRLFEEGKTAADRRGFRTTRRRLSRRRWRINLLNEIFDAHLAEVDPTFLARLKESNRSNLDPKKSFQGSLLFPERKDYQFYEEYPTIYHLRKALMEKDRKFDIREIYLAVHHIIKYRGNFLNGTPMRSFKVENIELNTLFDQLNQLYAEIVPDNELAFDLAQVADVKDVLSSTTIYKMDKKKQLVKMMLLPASNKALQSENKKIVTQFVNAILNYKFKLDVLLQVETDADWSLKLNDEGADDKLEEFTGDLDENRLEIIDLLQRLHNWFSLNEITKDGNSLSAAMVEKYENHHHHLGLLKKVIENHPDAKKAKALKETYTAYVGKTDDKTQNQDDFYKAVEKNLDDSPDAKGIKRLIQLDQFMPKQRTGQNGAIPHQLHQQELDQIIEKQSKYYPFLAEPNPNVKRRKDAPYKLDELIAFKIPYYVGPLVTPEEQAQNKENVFAWMKRKAAGPITPWNFDEKVDRMESANRFIRRMTTKDTYLFGEDVLPAESMIYQKFVVLNELNNLKINGRHLSLKDKQDVYNDLFKQQKTVSIKALQNYYVTKKKAATAPTVGGLADPKKFLSSLSTYIDFKNMFGERVNDPQFQEDLEQIVEWSTIFEDRGIFKAKLQALGWLSEKQIQQLVAKRYKGWGRLSKKLLTGLKNAEGYSILDEMWRSTENFMQIQSRPEFAALIQQANEKQFEGNDPDNVWENIENILGDAYTSPQNKKAIRQVVKVVQDIEKAVGNPPEKIAIEFTREAAANPQRTQSRLRTLEKLYESAEEVVDAGLTAELAEFKENKHVLSDKYYLYFTQLGRDVYTGDTISLDKLNDYDVDHILPQSFIKDDSLDNRVLTIRAVNNGKSDNVPAKMFGKKMGSFWRHLLDNGMISKRKYNNLITDPDNISKYAQKGFINRQLVETSQVIKLTANILNGIYDKDTEIIEVPAKMNSQMRKMFDLVKVREVNDYHHAFDAYLTIFIGNYLYKCYPKLRPYFVYDNFKKFGNKEDIGHKRFNFLGKIEREKKVVAPETGEILWSNVAPNETIKQIKKVYNYKFMIVSREITTRRAELFNQTVYPKNYRGKLIPIKEDRPTDLYGGYSGNTDAYLAIVALEDKKKGKYFKVVGIPTRAAAKLEKLKQQDSQQYLQALHEVIAPQFTKSTKKGIKKTEFEIVLDKVHYRQLVQDGPVKMMLGSSTYKYNAKQLVLSEKAL

SEQ ID NO: 126 - protein, 1398 aa, Veillonella parvula
METQASNQLISSHLKGYPIKDYFVGLDIGTSSVGWAVTNKAYELLKFRSHKMWGSRLFDEGESAVARRGFRSMRRRLERRKLRLKLLEELFADAMAQVDPTFFMRLRESKYHYEDKTTGHSSKHILFIDKNYNDQDYFKEYPTVYHLRSELMKSGTDDIRKLFLAVHHILKYRGNFLYEGATFDSNASTLDDVIKQALENITFNCFDCNSAISSIGQILMEAGKTKSDKAKAIEHLVDTYIATDTVDTSSKTQKDQVKEDKKRLKAFANLVLGLNASLIDLFGSVEELEEDLKKLQITGDTYDDKRDELAKAWSDEIYIIDDCKSVYDAIILLSIKEPGLTISESKVKAFNKHKDDLAILKSLLKSDRSIYNTMFKVDEKGLHNYVHYIKQGRTEETSCNREDFYKYTKKIVEGLSDSKDKEYILSQIELQILLPLQRIKDNGVIPYQLHLEELKAILAKCGPKFPFLNEVADGFSVAEKLIKMLEFRIPYYVGPLNTHHNVDNGGFAWAVRKASGRVTPWNFDDKIDREKSAAAFIKNLTNKCTYLLGEDVLPKSSLLYSEFMLLNELNNVRIDGKPLEKVVKEHLIEAVFKQDHKKMTKNRIEQFLKDNGYISETHKHEITGLDGEIKNDLASYRDMVRILGDGFDRSMAEEIITDITIFGESKKMLRETLRKKFASCLDDEAIKKLTKLRYRDWGRLSQKLLNGIEGCDKAGDGTPETIIILMRNFSYNLMELLGDKFSFMERIQEINAKLTEGQIVNPHDIIDDLALSPAVKRAVWQALRIVDEVAHIKKALPARIFVEVTRSNKNEKKKKDSRQKRLSDLYAAIKKDDVLLNGLNNEIFGELKSSLAKYDDAALRSKKLYLYYTQMGRCAYTGEIIELSLLNTDNYDIDHIYPRSLTKDDSFDNLVLCKRTANAQKSDAYPISEEIQKTQKPFWTFLKQQGLISERKYERLTRITPLTADDLSGFIARQLVETNQSVKAATTLLRRLYPGVDVVFVKAENVTDFRHDNNFIKVRSLNHHHHAKDAYLNIVVGNVYHERFTRNFRAFFKKNGANRTYNLAKMFNYDVNCTNAKDGKAWDVKTSMDTVKKMMDSNDVRVTKRLLEQTGALADATIYKATVAGKAKDGAYIGMKTKSSVFADVSKYGGMTKIKNAYSIIVQYTGKKGEVIKEIVPLPIYLTNRNTTDQDLINYVASIIPQAKDISIIYGKLCINQLVKVNGFYYYLGGKTNSKFCIDNAIQVIVSNEWIPYLKVLEKFNNMRKDNKDLKANVVSTRALDNKHTIEVRIVEEKNIEFFDYLVSKLKMPIYQKMKGNKAAELSEKGYGLFKKMSLEEQSIHLIELLNLLTNQKTTFEVKPLGITASRSTVGSKISNQDEFKVINESITGLYSNEVTIV

SEQ ID NO: 127 - protein, 1485 aa, Prevotella bivia
MKNILGLDLGTNSIGWAKISIDDNGKYIKDSIKLGSRIIPMSQDVLSNFSKGVTLSQTSERTSFRGARRLRERTLLRRERLHRILHLLGFLPKHYEKAIGWDRNDNKTYGKFINHAEPKLAWCKDNNGKMRFLFMDSFHDMLSEFSEKHPELLANGKKIPLDWTIYYLRKKALYKAITKEELAWILLNFNQKRGYYQLRGEEDRDSEANKKEYLELKVIGVEATGEKKGNDIWYNIHLENGWIYRRSSKNPLNDWLGKVKSFIVTTDLDADGNPKKDKDGNIKRSFRAPSEGDWTLIKKRTESLLENSGQTVGQFIYNHILEEPSAKIRGNFIRTIERKYYKDELKAILEKQKEFHHELSSESLLTECAKELYKRNIAHQEVLLKKGIIHLLLNDILFYQRPLKIKKSLIDNCPYENYKYVDKKSGDIKVKSIKCIAKSNPFFQEFRLWQFVSNLRLYRKSDDKDVTSEHLVTTDDYANLFTYLNNRKDIKQSVLLKEYFKIKKVKTINGAEYPVRWNYIDDDNKTYPCNETRYDILHALSKTELKSEWLTPERTYRLWHLLYSIESKEETKKALNKLNLSDDFTEAFLTIKPFKKEYGSYSEKAIKKLLSLMRMGYLWSEDEAIKQVGAEIEKTIEGELPDYVLQRLEKSQHNYNKISDFSGLPLWLASYIIYGRHSEAKEIIHWDNPESMMAYIKDFRQHSMRNPIVEQCVLETLRTVHDIWKEIGHIDEIHIELGREMKSTSEQRKAITQNVLHNQNTNIRIKLLLQELKNDNNITGVRPYSPMQQEILRIYEEGALQGLTKEDKDYNDILKISQTAQPTSNELTRYKLWLEQKYRSPYTGKAISLSKLFTSAYQIEHVIPQSRYFDDSLSNKVICESEVNTLKKAMLGMEFIKTCGGQKVHCTLLGDVEIYNEEDYKAFVNEHYSNNRTKRNKLLMEDIPQEFINRQLNDSRYISKMVKQLLSAIVRGQEEVEATSKFVIPCTGGITDRLKKDWGLNDIWNNLVSPRFQRMNALTGSEYFGHWENKEGKRVFQTTMPIQLQQGFSKKRIDHRHHAMDALVIACASRNIISYLNNETAQDTERRRDLRQKLCDKGGSVRKPWDSFTQDTQYALKDIIVTFKNYVRIINKATNYYEHYKTDGKKGMISQKGDELWAIRKPMHKETVFGKVNLRRPKRVSLSKAIDSVDIICNRKLKKYIKARLNEGLQKKQILNIFKELNNVWEGIDVNKIDIWEMSNDKEPMVATRKQLDTSFDEKKIRSISDTGIQKILLNYLITKNNNPELAFTPEGIQEMNSNISEYNDHKKHQPIYKVRVTEPLGAKYPIGTMGNNPKKFVEAQAGTNLYFAIYEDKEGKRNYDTIPLNIAAERLNQQLSPVPETNENNTPLKFYLSPNDLVYVPSEEERHSGNNIQLDKNRIYKMVSSTSKRCFFIHHRVAISLVDKKEFSAQNKMERSIDNEQVMIKSVCWKLITDRLGNIIKVIK

SEQ ID NO: 128 - protein, 1218 aa, Prevotella buccalis
MNKRILGLDTGTNSLGWAVVDWDEHAQSYELIKYGDVIFQEGVKIEKGIESSKAAERSGYKAIRKQYFRRRLRKIQVLKVLVKYHLCPYLSDDDLRQWHLQKQYPKSDELMLWQRTSDEEGKNPYYDRHRCLHEKLDLTVEADRYTLGRALYHLTQRRGFLSNRLDTSADNKEDGVVKSGISQLSTEMEEAGCEYLGDYFYKLYHEQGNKVRIRQRYTDRKKHYQHEFDAICEKQELSSELIEDLQRAIFFQLPLKSQRHGVGRCTFERGKPRCADSHPDYEEFRMLCFVNNIQVKGPHDLELRPLTYEEREKIEHLFFRKSKPNFDFEDIAKELAGKKNYAWIHDKEERAYKFNYRMTQGVPGCPTTAQLKSIFGDDWKTGIAETYTLIQKKNGSKSLQEMVDDVWNVLYSFSSVEKLKEFAHHKLQLDEENAEKFAKIKLSHSFAALSLKAIRKFLPFLRKGMYYTHASFFANIPTIVGKEIWNNEQSRKYIMENVGELVFNYQPKHRDVQGTIEMLIKDFLANNFELPAGATDKLYHPSMIETYPHALRNEFGILQLGSPRTNAIRNPMAMRSLHVLRRVVNQLLKESIIDENTEVHVEYARELNDANKRRAIADRQKEQDKQHKKYGDEIRKLYKEETGKDIEPTQTDVLKFQLWEEQNHYCLYTGEQIGITDFIGSNPKFDIEHTIPQSVGGDSTQMNLTLCDNRFNREVKKAKLPTELANHEEILTRIEPWKNKYEQLVKERDKQRTFAGMDKAVKDIRIQKRHKLQMEIDYWRGKYERFTMTEVPEGFSRRQGTGIGLISRYAGLYLKSLFHQADSRNKSNVYVVKGVATAEFRKMWGLQSEYEKKCRDNHSHHCMDAITIACIGKREYDLMAEYYHMEETFRQGRGSKPKFSKPWATFTEDVLNIYKNLLVVHDTPNNMPKHTKKYVQTSKGKVLAQGDTARGSLHLDTYYGAIERDGEIRYVVRRPLSSFTNPKELENIVDETVKRTIKEAIADKNFKQAIAEPIYMNEDKGILIKKVRCFANSVKQPINIRQHRDLSKKEYKQQYHVMNENNYLLAIYEGLVKNKVVREFEIVSYIEAAKYYKRSQDRNIFSSIVPTHSTKYGLPLKTKLLMGQQVLMFEENPDEIQVDNTKDLVKRLYKVVGIEKDGRIKFKHHQEARKEGLTIYSTPYKNNDDYVPIFRQSIKNINILVDGIDFNIDILGKVTLKE

SEQ ID NO: 129 - protein, 1218 aa, Prevotella timonensis
MNKRILGLDTGTNSLGWAVVDWDEHAQSYELIKYGDVIFQEGVKIEKGIESSKAAERSGYKAIRKQYFRRRLRKIQVLKVLVKYHLCPYLSDDDLRQWHLQKQYPKSDELMLWQRTSDEEGKNPYYDRHRCLHEKLDLTVEADRYTLGRALYHLTQRRGFLSNRLDTSADNKEDGVVKSGISQLSTEMEEAGCEYLGDYFYKLYDAQGNKVRIRQRYTDRNKHYQHEFDAICEKQELSSELIEDLQRAIFFQLPLKSQRHGVGRCTFERGKPRCADSHPDYEEFRMLCFVNNIQVKGPHDLELRPLTYEEREKIEPLFFRKSKPNFDFEDIAKALAGKKNYAWIHDKEERAYKFNYRMTQGVPGCPTIAQLKSIFGDDWKTGIAETYTLIQKKNGSKSLQEMVDDVWNVLYSFSSVEKLKEFAHHKLQLDEESAEKFAKIKLSHSFAALSLKAIRKFLPFLRKGMYYTHASFFANIPTIVGKEIWNKEQNRKYIMENVGELVFNYQPKHREVQGTIEMLIKDFLANNFELPAGATDKLYHPSMIETYPNAQRNEFGILQLGSPRTNAIRNPMAMRSLHILRRVVNQLLKESIIDENTEVHVEYARELNDANKRRAIADRQKEQDKQHKKYGDEIRKLYKEETGKDIEPTQTDVLKFQLWEEQNHHCLYTGEQIGITDFIGSNPKFDIEHTIPQSVGGDSTQMNLTLCDNRFNREVKKAKLPTELANHEEILTRIEPWKNKYEQLVKERDKQRTFAGMDKAVKDIRIQKRHKLQMEIDYWRGKYERFTMTEVPEGFSRRQGTGIGLISRYAGLYLKSLFHQADSRNKSNVYVVKGVATAEFRKMWGLQSEYEKKCRDNHSHHCMDAITIACIGKREYDLMAEYYRMEETFKQGRGSKPKFSKPWATFTEDVLNIYKNLLVVHDTPNNMPKHTKKYVQTSIGKVLAQGDTARGSLHLDTYYGAIERDGEIRYVVRRPLSSFTKPEELENIVDETVKRTIKEAIADKNFKQAIAEPIYMNEEKGILIKKVRCFAKSVKQPINIRQHRDLSKKEYKQQYHVMNENNYLLAIYEGLVKNKVVREFEIVSYIEAAKYYKRSQDRNIFSSIVPTHSTKYGLPLKTKLLMGQLVLMFEENPDEIQVDNTKDLVKRLYKVVGIEKDGRIKFKYHQEARKEGLPIFSTPYKNNDDYAPIFRQSINNINILVDGIDFTIDILGKVTLKE

SEQ ID NO: 130 - protein, 1487 aa, Prevotella timonensis
MKNILGLDLGSNSVGWALVKVEENGNPIGSIKMGSRIIPMSQDILGSFEKGDTVSQTAQRTLYRGKRRLIERHVLRRERLCRVLHIMNFLPAHFDRLLGWDKTDNKTYGKFIDDSEPKLAWRQNKNEMGKMEFVFMDSFHEMLSDFAKHQPQLIANGKKVPLDWTIYYLRKKALTQLISKEELAWILLNFNKKRGYYQLRGEEEEEQPTKKEEYKVLKVISVDADEGQKGNGIWYNIHLEDGGIYKKKSDIPLYDWVGKTLQLIVVTTYEKDGKTPKIFDSGKQNPSYRLPKEDDWGLVKKRTESQLQSSGKTVGAFIYDNILSKPDDKIRGNLVRTIERKYYKKELIEILQQQAKYHDELHNQNLLESCAKELYAHNDVHYNEVIKSNMINLLVNDIIFYQRPLKSKKSLIANCKYESYEYVDKETGEIKEMPIKCIAKSNPYYQEFRLWQFIHNLRLSDVVTREDVTAQYLSTPQDYCNLFTYLNDRKEIKQDILLKDFFKIKKVQIDKEKVFPIEWNYIKDATKSYPCNETRYELLSALKRAGMDKQWLDDTPNMQYRLWHLLYSVEEKEESAKALRKLYDDDKFVTSFLKIKPFNKCYGAYSEKAIKRLLTLMRMGKAWNEQAIDAKTLKCIQQIITDNVDSKLKEKIDDSRYVLHHVSDFQGLPTYLASYVIYGRHSEVTDIQCWDSPEDLLKFIRDFKQHSLRNPIVEQVILETLRVVYDIWKAEKHIDEIHVEVAREMKLTAQQRNEANLRNLNNEATNLRIKYLLEELKNDTFIKDVRPLSPIHQEKMRIYEQAVLGNLNKQDKDYDDIIKISKKEHPTNAELIRYKLWLEQRYCSPYTGKAISLSKLFTTAYEIEHIIPQSRYFDNSFNNKVICEAEVNKAKGNMLGYEFIKKQGGQKIYCTQLGKAVTILKEEAYKQFVNEHYAHNKRKRDNLLAENIPESFSSRQLNDTRYITKTIMSLLSNVVRQQSEEEATAKNLLPSSGSVTDRLKNDWGLKDVWNTIVTPRFERLNKLSGTNDFGEMKEENGNRYFQTNVPLEYEKGFKKKRIDHRHHAMDALVIACTTRNMVNYISNANANSPKQREDLRQLLCDKNRIINKPWDTFTQDALKALNDIVVSFKNNVRIINRATNRYQRYDKNGKKIIFSQKGDDMWAIRKSMHKETVFGRVNLIRKEVLPIAKALDNISAICNAQLRAYVNDLVDKHFNKKQLVAHFKSLNYKWNRQDVSKVEVWISSDNKTPMVAVRKPLDTSFDKKKIASITDTGIQTILLNYLESKGGDASVAFAPEGIQEMNSNIELYNNGKAHKPIKNVRLSEPLGAKYQVGERGAKTKKYVEADKGTNLFFAIYEDEEGKRYYYSVPLREAIERQKQKLSPVPEYNEKGVALKFYLSPNDLVYVPTEEERTMGTCHIDKARIYKMVSSTGCSCYFVPSTFAKVIVDKVELQSLNKMEKAITDECIKEVCWKLKVDRLGNIINVIK

SEQ ID NO: 131 - protein, 1138 aa, Bifidobacterium dentium
MLCRCHRRYRIGIDVGLMSVGLAAIEVDETGFPIRILNIQSVIHDGGIDPQLGKKKSISRKAISGVARRTRRMRRRKVVRLRQLDATLESLGFPIVEPDSLDTWEIWLTRAKLASSYIQDDETRKEDVSIALRHIARHRGWRNPYSNVESLFVDVAPSEQYEELRRKAEEKLGTSLSGNPTSAEIVECILKRQVGEVQLRTRSRKGVNGNAVEKEGLLPTKLMQSDNAAEIRRIFKVQRIDDETGRKLLRAVFKACSPKGSVERRVGRDALAPGLPRALKASLAFQEYRIANVLTNLVISEDGTKRKLTIAEKQRVFGFLSSNETDDITWIDVAEKLGLERRQIQGVGCLTADGEERISSTPPRNITALHIHSAKPVIREKLVAWWKAASPTVRETMVELLSNTVDIDRVREDMDYSSAVAFIDSLGDEELTALDSVDLLSGRAAYSRQTLKQLTERMLNTDDDLHEARKAVFGVDDNWKPPVDAISTSVGNPAVDRVLKIVNRYLLACQKRWRNPQSVQIEHVRESFSSVAKAKETERVQGERARYRNDLRRELCEQEGLNKIRESDIRRWESVQRQNGTCLYCGSPITFRTCEMDHIVPRKGVGSTNTRVNLAAACAACNKLKSNTAFSVWARTEGAANRKVSQRDAIERVKTFIFNKSVPPREQRAFKQAVISRLRQAESDPAIDNRSIESVAWMADELHRRIEAYFNQDADVSGNTPATQVWVFQGRVTALARKASGIEGRIHFAGEWKKTRLDRRHHAVDAAVIAMMNHSAAQTLVERDSLRLSQWITRKPETWKNYPFSEGQKKTRFKEWLDCMNALLDLLNDALDSDRVPVTRCQRMSLGNSQAHAATIRKMKRVELFSPMDADLIRRASTPALYCALTRLPEYSPEKGLPENRGREIVLNGRHIRSTETVDFFASGAAQLMVRNGSAEIGDSIHHMRIYRYRKTGAKSQEYVYGMIRVFQIDLLHASSENLFAVQLPSQSVSVRYGDKNVVQAIQEGRAEYLGHIVPNDEILISYEGVRMKDSEKIGAYANDFSGTASELAQRRHWVVVGSDVSKLALRPSYLSEEGLENSGSESERLSKQTRKVIEGKGWVVAVNILAKYHPVVIRRNALGEPRFRTNSGMPVSWRWDR

SEQ ID NO: 132 - protein, 587 aa, Neisseria subflava
MATSRSRIRSQTDAFGVVGSLVAFNQTSRLFVAKKNEGETADKELGALLKGVADNAHALQTGNFRTPAELALNKFEKESGHIRNQRGDYSHTFNRKDLQAELNLLFEKQKEFGNPHVSDGLKEGIETLLMAQRPALSGDAVQKMLGYCTFEPTEPKAAKNTYTAGRFIWLTKLNNLRILEQGSERPLTTTERATLMDEPYRKSKLTYAQARKLLGLEDTAFFKGLRYGKDNAEASTLMEMKAYHAISRALEKEGLKDKKSPLNLSPELQDEIGTAFSLFKTDEDITGRLKDRVQPEILEALLKHISFDKFVQISLKALRRIVPLMEQGKRYDEACAEIYGDHYGKKNAEEKIYLPPIPADEIRNPVVLRALSQARKVINAVVRRYGSPARIHIETAREVGKSFKDRKEIEKRQEENRKDREKAAAKFREYFPNFVGEPKSKDILKLRLYEQQHGKCLYSGKEINLGRLNEKGYIEIDHALPFSRTWDDSFNNKVLVLGSENQNKGNQTPYEYFNGKDNSREWQEFKARVETSRFPRSKKQRILLQKFDEDGIYRIGVKTALSFPKYQIDELGKEIRPCRLKKRPPVR

SEQ ID NO: 133 - protein, 1269 aa, Mycoplasma gallisepticum
MNNSIKSKPEVTIGLDLGVGSVGWAIVDNETNIIHHLGSRLFSQAKTAEDRRSFRGVRRLIRRRKYKLKRFVNLIWKYNSYFGFKNKEDILNNYQEQQKLHNTVLNLKSEALNAKIDPKALSWILHDYLKNRGHFYEDNRDFNVYPTKELAKYFDKYGYYKGIIDSKEDNDNKLEEELTKYKFSNKHWLEEVKKVLSNQTGLPEKFKEEYESLFSYVRNYSEGPGSINSVSPYGIYHLDEKEGKVVQKYNNIWDKTIGKCNIFPDEYRAPKNSPIAMIFNEINELSTIRSYSIYLTGWFINQEFKKAYLNKLLDLLIKTNGEKPIDARQFKKLREETIAESIGKETLKDVENEEKLEKEDHKWKLKGLKLNTNGKIQYNDLSSLAKFVHKLKQHLKLDFLLEDQYATLDKINFLQSLFVYLGKHLRYSNRVDSANLKEFSDSNKLFERILQKQKDGLFKLFEQTDKDDEKILAQTHSLSTKAMLLAITRMTNLDNDEDNQKNNDKGWNFEAIKNFDQKFIDITKKNNNLSLKQNKRYLDDRFINDAILSPGVKRILREATKVFNAILKQFSEEYDVTKVVIELARELSEEKELENTKNYKKLIKKNGDKISEGLKALGISEDEIKDILKSPTKSYKFLLWLQQDHIDPYSLKEIAFDDIFTKTEKFEIDHIIPYSISFDDSSSNKLLVLAESNQAKSNQTPYEFISSGNAGIKWEDYEAYCRKFKDGDSSLLDSTQRSKKFAKMMKTDTSSKYDIGFLARNLNDTRYATIVFRDALEDYANNHLVEDKPMFKVVCINGSVTSFLRKNFDDSSYAKKDRDKNIHHAVDASIISIFSNETKTLFNQLTQFADYKLFKNTDGSWKKIDPKTGVVTEVTDENWKQIRVRNQVSEIAKVIEKYIQDSNIERKARYSRKIENKTNISLFNDTVYSAKKVGYEDQIKRKNLKTLDIHESAKENKNSKVKRQFVYRKLVNVSLLNNDKLADLFAEKEDILMYRANPWVINLAEQIFNEYTENKKIKSQNVFEKYMLDLTKEFPEKFSEFLVKSMLRNKTAIIYDDKKNIVHRIKRLKMLSSELKENKLSNVIIRSKNQSGTKLSYQDTINSLALMIMRSIDPTAKKQYIRVPLNTLNLHLGDHDFDLHNMDAYLKKPKFVKYLKANEIGDEYKPWRVLTSGTLLIHKKDKKLMYISSFQNLNDVIEIKNLIETEYKENDDSDSKKKKKANRFLMTLSTILNDYILLDAKDNFDILGLSKNRIDEILNSKLGLDKIVK

SEQ ID NO: 134 - protein, 1354 aa, Prevotella melaninogenica
MADFAKYQPGMVADGRKIPLDWTLYYLRKKALTQAIRKEELAWILLNFNQKRGYYQLRGEEEEENSTKHEEYYELKVVSVEAAEEGKGGNTWYNVTLENGWIYRRQSKIELNDWVGKVRPFIVTTEYEIDGVTIKKDKNGEVKRSFRAPSENDWGLRKKRTESLLEESGKTVGAFIYNHILSEPADKIRGNFIRTIERKFYKKELEAILREQSKHQKELKDIDTLIACIKELYPNNKPHQDSLIKKDMTYLLITDLIFYQRPLKSKKSLIADCPYEYYEYVIKETGENKRQSIKCIAKSNPYYQEFRLWQFIINLRLFDRNNDKEVTSEYLSSMEDYTRLFTYLNDRKDINQETLLKDFFKQKKVKRGMEKEFPIRWNYIEDKEKKYPCNETRHELLTALGKVGIDHSWLDDKELFYRLWHLLYSVESKEEAEGALRKLVDNDDFVNAFLKIKPFKKEYGAYSEKAIKKLLAVMRMGNLWNEVDICEQTRDRIQNIIKGDIDEKIKDRMGRTFSQLSDFQGLPEWLACYVVYGQHSEATDIQRWTKPENLMAYINGFKQHSLRNPIVEQCILETLRTVHDIWKEAGHIDEIHIELGRGMKSTADQRARMSKSIMQNENTNLRIKSLLMELKNAKEFENVRPYSPMQQEILRIYEEGALQELTKEDAQYNEISKISQMAQPSANELLKYRLWLEQKYCSPYTGKPISLSKLFTSAYQIEHIIPQSRYFDDSFTNKVICEAEVNQLKSNMLGYEFIKKHGGEIVRCTMIGDVKLLDAKEYYNFVTEHYTNNRRKKEKLLMEDIPQEFLNRQMNDSRYISKKVMAILSNIVREEDEQEAKSKFVIACSGGITDRLKQDWGLNDVWNSIVYPRFERLNKLTNTENFGRWENKKGKQVFQTSVPLELQKDFSKKRIDHRHHAMDALVIACASNNIINYLNNESAKSQEKREDLRKKLCDKNRIIRKPWETFTQDAHTALENVVVSFKNYIRVINKATNYYEKYDKNGKKEIAEQKGQDMWAIRKPMHKETVFGQVNLRRKITIKLKDALEKIPAICDKELRDYINILVAKQFNKKQILAHFKSINYRLNMKSVDKVDVWQFSNEKEPMVATRKSVDTSFDTKRIATITDTGIQKILLNYLKAKNNDPNIAFTPEGIAEMNKHITEYNNGKQHQPILKVRVSEPKGAKYQVGETGNKRSKFVEAQKGTNLYFAIYEDKEGNRSYNTIPLNEVIERLKQGLSPVPDANEKSIPLKFHLSPNDLVYVPKTDEENEIKMGQIYKFVDSSGTTANFVPHRVSNLIYNVDKKIAENFCNHEIIQNEYGIGSPQSKNQKSITGEMIKAVCWKLEVDRLGNIHKIIK

SEQ ID NO: 135 - protein, 1130 aa, Streptococcus gallolyticus
MTNGKILGLDIGIASVGVGIIEAKTGKVVHANSRLFSAANAENNAERRGFRGSRRLNRRKKHRVKRVRDLFEKYEIVTDFRNLNLNPYELRVKGLTEQLTNEELFAALRTISKRRGISYLDDAEDDSTGSTDYAKSIDENRRLLKTKTPGQIQLERLEKYGQLRGNFTVYDENGEAHRLINVFSTSDYEKEARKILETQADYNKKITAEFIDDYVEILTQKRKYYHGPGNEKSRTDYGRFRTDGTTLENIFGILIGKCSFYPDEYRASKASYTAQEYNFLNDLNNLKVPTETGKLSTEQKEALVEFAKSTATLGPAKLLKEIAKILDCKVDEIKGYREDDKGKPDLHTFEPYRKLKFNLDSVNIDDLSREVLDKLADILTLNTEREGIEDAIRHNLPNQFTEGQISEIIKVRKSQSTAFNKGWHSFSAKLMNELIPELYATSDEQMTILTRLEKFKVNKKSSKNTKTIDEKEVTDEIYNPVVAKSVRQTIKIINAAVKKYGDFDKIVIEMPRDKNADDEKKFIDKRNKENKKEKDDALKRAAYLYNGTDKLPDEVFHGNKQLETKIRLWYQQGERCLYSGKPIPIQELVHNSNNFEIDHILPLSLSFDDSLANKVLVYAWTNQEKGQKTPYQVIDSMDAAWSFREMKDYVLKQKGLGKKKRDYLLTTENIDKIEVKKKFIERNLVDTRYASRVVLNSLQSALRELGKDTKISVIRGQFTSQLRRKWKIDKSRETYHHHAVDALIIAASSQLKLWEKQDNPMFVDYGNNQVVDKQTGEILSVSDDEYKELVFQPPYQGFVNMISSKGFEDEILFSYQVDSKYNRKVSDATIYSTRKAKIGKDKKEETYVLGKIKDIYSQNGFDTFIKKYNKDKTQFLMYQKDPLTWENVIEVILRDYPTTKKSEDGKNDVKCNPFEEYRRENGLVCKYSKKGKGTPIKSLKYYDKKLGNCIDITPEGSKNEVVLQSLNPWRADVYFNPETLKYELLGLKYSDLSFEKGTGKYHISQEKYDVIKEKEGIGKKSEFKFTLYRNDLILIKDTASGEQEIYRFLSRTMPNVKHYAELKPYDKEKFDNVQELVEALGEADKVGRCIKGLNKSNLSIYKVRTDVLGNKYFVKKEGDKPKLDFKNNKK

SEQ ID NO: 136 - protein, 1371 aa, Streptococcus gallolyticus
MTEKNYSIGLDIGTNSVGWAVITDDYKVPAKKMKVLGNTDKKYIKKNLLGALLFDNGETAEATRLKRTARRRYTRRKNRLRYLQEIFAEEMAKVDESFFYRLDESFLTTDDKDFERHPIFGNKADEIKYHQEFPTIYHLRKHLADSHEKADLRLIYLALAHMIKFRGHFLIEGELNAENTDVQKLFEAFVEVYDRTFDDSNLSEITVDASSILTEKFSKSRRLENLIKHYPTEKKNTLFGNLVALALGLQPNFKTSFKLSEDAKLQFSKDTYEEDLEELIGKIGDEYADLFTSAKNLYDAILLSGILTVADNTTKAPLSASMIKRYNEHQVDLKKLKEFIKNNASDKYDEIFNDKDKNGYAGYIENGVKQDEFYKYLKTTLSKIDGSDYFLDKIEREDFLRKQRTFDNGSIPHQIHLQEMHAILRRQGEHYAFLKENQAKIEKILTFRIPYYVGPLARKNSRFAWAEYHSDEKITPWNFDEIIDKEKSAEKFITRMTLNDLYLPEEKVLPKHSLVYETYTVYNELTKVKYVNEQGKSNFFDANMKQEIFEHVFKENRKVTKDKFLNYLNKEFPEYRIQDLIGLDKENKSFNASLGTYHDLKKILDKSFLDDKTNETIIEDIIQTLTLFEDRDMIRQRLQKYSDIFTPQQLKKLERRHYTGWGRLSYKLINGIRNKENGKSILDYLIDDGYANRNFMQLISDDTLPFKQIIKDAQIIGDIDDVTSVVRELPGSPAIKKGILQSVKIVDELVKVMGHNPDNIVIEMARENQTTNRGRNQSQQRLKKLQDSLKELGSNILNEEKPSYIEGKVENNHLQDDRLFLYYIQNGKDMYTGDELDIDHLSDYDIDHIIPQAFIKDDSIDNRVLTSSAKNRGKSDDVPSLDIVHDRKADWIRLYKSGLISKRKFDNLTKAERGGLTENDKAGFIKRQLVETRQITKHVAQILDSRFNTERDENDKVIRNVKVITLKSNLVSQFRKDFKFYKVREINDYHHAHDAYLNAVVGTALLKKYPKLAPEFVYGEYKKYDIRKFITSSGDKATAKYFFYSNLMNFFKRVIRYSNGKVVVRPVIECSKDTGEIAWNKQTDFEKVRRVLSYPQVNIVKKVETQTGGFSKESILPKGNSDKLIPRKTKKFRWDTPKYGGFDSPNIAYSVFVIADVEKGKAKKLKTVKELVGISIMERSSFEENPVVFLEKKGYQNVQEDNLIKLPKYSLFEFEGGRRRLLASASELQKGNEVVLSRHLVELLYHAHRVNSFNNSEHLKYVSEHKKEFGEVLSCVENFAKSYVDVEKNLGKIRAVADKIDTFSIEDISISFVNLLTLTALGAPADFNFLGEKIPRKRYTSTKECLNATLIHQSITGLYETRIDLSKLGEE

SEQ ID NO: 137 - protein, 1168 aa, Azospirillum sp.
MARPAFRAPRREHVNGWTPDPHRISKPFFILVSWHLLSRVVIDSSSGCFPGTSRDHTDKFAEWECAVQPYRLSFDLGTNSIGWGLLNLDRQGKPREIRALGSRIFSDGRDPQDKASLAVARRLARQMRRRRDRYLTRRTRLMGALVRFGLMPADPAARKRLEVAVDPYLARERATRERLEPFEIGRALFHLNQRRGYKPVRTATKPDEEAGKVKEAVERLEAAIAAAGAPTLGAWFAWRKTRGETLRARLAGKGKEAAYPFYPARRMLEAEFDTLWAEQARHHPDLLTAEAREILRHRIFHQRPLKPPPVGRCTLYPDDGRAPRALPSAQRLRLFQELASLRVIHLDLSERPLTPAERDRIVAFVQGRPPKAGRKPGKVQKSVPFEKLRGLLELPPGTGFSLESDKRPELLGDETGARIAPAFGPGWTALPLEEQDALVELLLTEAEPERAIAALTARWALDEATAAKLAGATLPDFHGRYGRRAVAELLPVLERETRGDPDGRVRPIRLDEAVKLLRGGKDHSDFSREGALLDALPYYGAVLERHVAFGTGNPADPEEKRVGRVANPTVHIALNQLRHLVNAILARHGRPEEIVIELARDLKRSAEDRRREDKRQADNQKRNEERKRLILSLGERPTPRNLLKLRLWEEQGPVENRRCPYSGETISMRMLLSEQVDIDHILPFSVSLDDSAANKVVCLREANRIKRNRSPWEAFGHDSERWAGILARAEALPKNKRWRFAPDALEKLEGEGGLRARHLNDTRHLSRLAVEYLRCVCPKVRVSPGRLTALLRRRWGIDAILAEADGPPPEVPAETLDPSPAEKNRADHRHHALDAVVIGCIDRSMVQRVQLAAASAEREAAAREDNIRRVLEGFKEEPWDGFRAELERRARTIVVSHRPEHGIGGALHKETAYGPVDPPEEGFNLVVRKPIDGLSKDEINSVRDPRLRRALIDRLAIRRRDANDPATALAKAAEDLAAQPASRGIRRVRVLKKESNPIRVEHGGNPSGPRSGGPFHKLLLAGEVHHVDVALRADGRRWVGHWVTLFEAHGGRGADGAAAPPRLGDGERFLMRLHKGDCLKLEHKGRVRVMQVVKLEPSSNSVVVVEPHQVKTDRSKHVKISCDQLRARGARRVTVDPLGRVRVHAPGARVGIGGDAGRTAMEPAEDIS

SEQ ID NO: 138 - protein, 1345 aa, Streptococcus mutans
MKKPYSIGLDIGTNSVGWAVVTDDYKVPAKKMKVLGNTDKSHIKKNLLGALLFDSGNTAADRRLKRTARRRYTRRRNRILYLQEIFAEEMSKVDDSFFHRLEDSFLVTEDKRGERHPIFGNLEEEVKYHENFPTIYHLRQYLADNPEKVDLRLVYLALAHIIKFRGHFLIEGKFDTRNNDVQRLFQEFLAVYDNTFENSSLQEQNVQVEEILTDKISKSAKKDRVLKLFPNEKSNGRFAEFLKLIVGNQADFKKHFELEEKAPLQFSKDTYEEELEVLLAQIGDNYAELFLSAKKLYDSILLSGILTVTDVSTKAPLSASMIQRYNEHQMDLAQLKQFIRQKLSDKYNEVFSDVSKDGYAGYIDGKTNQEAFYKYLKGLLNKIEGSGYFLDKIEREDFLRKQRTFDNGSIPHQIHLQEMRAIIRRQAEFYPFLADNQDRIEKILTFRIPYYVGPLARGKSDFAWLSRKSADKITPWNFDEIVDKESSAEAFINRMTNYDLYLPNQKVLPKHSLLYEKFTVYNELTKVKYKTEQGKTAFFDANMKQEIFDGVFKVYRKVTKDKLMDFLEKEFDEFRIVDLTGLDKENKAFNASYGTYHDLRKILDKDFLDNSKNEKILEDIVLTLTLFEDREMIRKRLENYSDLLTKEQVKKLERRHYTGWGRLSAELIHGIRNKESRKTILDYLIDDGNSNRNFMQLINDDALSFKEEIAKAQVIGETDNLNQVVSDIAGSPAIKKGILQSLKIVDELVKIMGHQPENIVVEMARENQFTNQGRRNSQQRLKGLTDSIKEFGSQILKEHPVKHSQLQNDRLFLYYLQNGRDMYTGEELDIDYLSQYDIDHIIPQAFIKDNSIDNRVLTSSKENRGKSDDVPSKNVVRKMKSYWSKLLSAKLITQRKFDNLTKAERGGLTDDDKAGFIKRQLVETRQITKHVARILDERFHTETDENNKKIRQVKIVTLKSNLVSNFRKEFELYKVREINDYHHAHDAYLNAVIGKALLGVYPQLEPEFVYGDYPHFHGHKENKATAKKFFYSNIMNFFKKDDVRTDKNGEIIWKKDEHISNIKKVLSYPQVNIVKKVEEQTGGFSKESILPKGNSDKLIPRKTKKFYWDTKKYGGFDSPIVAYSILVIADIEKGKSKKLKTVKALVGVTIMEKMTFERDPVAFLERKGYRNVQEENIIKLPKYSLFKLENGRKRLLASARELQKGNEIVLPNHLGTLLYHAKNIHKVDEPKHLDYVDKHKDEFKELLDVVSNFSKKYTLAEGNLEKIKELYAQNNGEDLKELASSFINLLTFTAIGAPATFKFFDKNIDRKRYTSTTEILNATLIHQSITGLYETRIDLSKLGGD

SEQ ID NO: 139 - protein, 1024 aa, Helicobacter mustelae
MIRTLGIDIGIASIGWAVIEGEYTDKGLENKEIVASGVRVFTKAENPKNKESLALPRTLARSARRRNARKKGRIQQVKHYLSKALGLDLECFVQGEKLATLFQTSKDFLSPWELRERALYRVLDKEELARVILHIAKRRGYDDITYGVEDNDSGKIKKAIAENSKRIKEEQCKTIGEMMYKLYFQKSLNVRNKKESYNRCVGRSELREELKTIFQIQQELKSPWVNEELIYKLLGNPDAQSKQEREGLIFYQRPLKGFGDKIGKCSHIKKGENSPYRACKHAPSAEEFVALTKSINFLKNLTNRHGLCFSQEDMCVYLGKILQEAQKNEKGLTYSKLKLLLDLPSDFEFLGLDYSGKNPEKAVFLSLPSTFKLNKITQDRKTQDKIANILGANKDWEAILKELESLQLSKEQIQTIKDAKLNFSKHINLSLEALYHLLPLMREGKRYDEGVEILQERGIFSKPQPKNRQLLPPLSELAKEESYFDIPNPVLRRALSEFRKVVNALLEKYGGFHYFHIELTRDVCKAKSARMQLEKINKKNKSENDAASQLLEVLGLPNTYNNRLKCKLWKQQEEYCLYSGEKITIDHLKDQRALQIDHAFPLSRSLDDSQSNKVLCLTSSNQEKSNKTPYEWLGSDEKKWDMYVGRVYSSNFSPSKKRKLTQKNFKERNEEDFLARNLVDTGYIGRVTKEYIKHSLSFLPLPDGKKEHIRIISGSMTSTMRSFWGVQEKNRDHHLHHAQDAIIIACIEPSMIQKYTTYLKDKETHRLKSHQKAQILREGDHKLSLRWPMSNFKDKIQESIQNIIPSHHVSHKVTGELHQETVRTKEFYYQAFGGEEGVKKALKFGKIREINQGIVDNGAMVRVDIFKSKDKGKFYAVPIYTYDFAIGKLPNKAIVQGKKNGIIKDWLEMDENYEFCFSLFKNDCIKIQTKEMQEAVLAIYKSTNSAKATIELEHLSKYALKNEDEEKMFTDTDKEKNKTMTRESCGIQGLKVFQKVKLSVLGEVLEHKPRNRQNIALKTTPKHV

SEQ ID NO: 140 - protein, 765 aa, Butyrivibrio fibrisolvens
MGITIGLDLGVASVGWAVVNDDYEILESCSNIFPSADASKNSERRGFRQGRRLTRRRKNRIHDFQKLWEDKGFVIPSQGTEDVLAIKIKGLSEKLSVDEVYWVLLNSLKHRGISYLDDADSGDNSSDYAKSISRNEEELKEKLPCEIQWERLQKYGAYRGNISIVEDGEPITLRNVFTTSAYKKEVEQFIDTQAKYNAQYSGDFKADYLEIFNRKREYYEGPGNELSRTDYGKYTTEINADGEYITVDNIFDKLVGKCSVNPDERRAAGASYTAQEFNVLNDLNNLTISSESSFIEDGKLTEDAKRKIIETIKNAKTVNVKKIICDVIGDKKCQISGARIDKNEKEIFHSFEAYNKMRRALEEIGFDISSLSRENLDLIGDILTLNTDRESILNAFNRKGIELADEAKDILVKVRKTNGSLFNKWQSFGLSIMNELIPELYAQPKNQMELLTAMGVFKSRGDRFLECKEIPGDLIVDDIYNPVVSKTVRITVRILNALIKKYGYPDRVVIEMPRDKNSDEEQQRLKKEQRDNENEIKDIKARVKTEYGREITEEDFRQHSKLSLKLKLWNEQQGICPYSGKSIKIDDLLDNPNLFEVDHIIPLSISFDDSRNNKVLVYSSENQDKGNRTPLAYLASVNRQWDIHSFMDYVLKTYAGAQKRKKRDNLLNEQDITKVEVLQGFVNRNINDTRYASKVVLNSLQEYFSSKECSTKVKVIRGSFTHQMRVNLKLKKTVMNHMFIMQLMQCLLLFHRWDMTLIMNLQISI

SEQ ID NO: 141 - protein, 1338 aa, Coprococcus catus
MKQEYFLGLDMGTGSLGWAVTDSTYQVMRKHGKALWGTRLFESASTAEERRMFRTARRRLDRRNWRIQVLQEIFSEEISKVDPGFFLRMKESKYYPEDKRDAEGNCPELPYALFVDDNYTDKNYHKDYPTIYHLRKMLMETTEIPDIRLVYLVLHHMMKHRGHFLLSGDISQIKEFKSTFEQLIQNIQDEELEWHISLDDAAIQFVEHVLKDRNLTRSTKKSRLIKQLNAKSACEKAILNLLSGGTVKLSDIFNNKELDESERPKVSFADSGYDDYIGIVEAELAEQYYIIASAKAVYDWSVLVEILGNSVSISEAKIKVYQKHQADLKTLKKIVRQYMTKEDYKRVFVDTEEKLNNYSAYIGMTKKNGKKVDLKSKQCTQADFYDFLKKNVIKVIDHKEITQEIESEIEKENFLPKQVTKDNGVIPYQVHDYELKKILDNLGTRMPFIKENAEKIQQLFEFRIPYYVGPLNRVDDGKDGKFTWSVRKSDARIYPWNFTEVIDVEASAEKFIRRMTNKCTYLVGEDVLPKDSLVYSKFMVLNELNNLRLNGEKISVELKQRIYEELFCKYRKVTRKKLERYLVIEGIAKKGVEITGIDGDFKASLTAYHDFKERLTDVQLSQRAKEAIVLNVVLFGDDKKLLKQRLSKMYPNLTTGQLKGICSLSYQGWGRLSKTFLEEITVPAPGTGEVWNIMTALWQTNDNLMQLLSRNYGFTNEVEEFNTLKKETDLSYKTVDELYVSPAVKRQIWQTLKVVKEIQKVMGNAPKRVFVEMAREKQEGKRSDSRKKQLVELYRACKNEERDWITELNAQSDQQLRSDKLFLYYIQKGRCMYSGETIQLDELWDNTKYDIDHIYPQSKTMDDSLNNRVLVKKNYNAIKSDTYPLSLDIQKKMMSFWKMLQQQGFITKEKYVRLVRSDELSADELAGFIERQIVETRQSTKAVATILKEALPDTEIVYVKAGNVSNFRQTYELLKVREMNDLHHAKDAYLNIVVGNAYFVKFTKNAAWFIRNNPGRSYNLKRMFEFDIERSGEIAWKAGNKGSIVTVKKVMQKNNILVTRKAYEVKGGLFDQQIMKKGKGQVPIKGNDERLADIEKYGGYNKAAGTYFMLVKSLDKKGKEIRTIEFVPLYLKNQIEINHESAIQYLAQERGLNSPEILLSKIKIDTLFKVDGFKMWLSGRTGNQLIFKGANQLILSHQEAAILKGVVKYVNRKNENKDAKLSERDGMTEEKLLQLYDTFLDKLSNTVYSIRLSAQIKTLTEKRAKFIGLSNEDQCIVLNEILHMFQCQSGSANLKLIGGPGSAGILVMNNNITACKQISVINQSPTGIYEKEIDLIKL

SEQ ID NO: 142 - protein, 1035 aa, Candidatus Puniceispirillum
MRRLGLDLGTNSIGWCLLDLGDDGEPVSIFRTGARIFSDGRDPKSLGSLKATRREARLTRRRRDRFIQRQKNLINALVKYGLMPADEIQRQALAYKDPYPIRKKALDEAIDPYEMGRAIFHINQRRGFKSNRKSADNEAGVVKQSIADLEMKLGEAGARTIGEFLADRQATNDTVRARRLSGTNALYEFYPDRYMLEQEFDTLWAKQAAFNPSLYIEAARERLKEIVFFQRKLKPQEVGRCIFLSDEDRISKALPSFQRFRIYQELSNLAWIDHDGVAHRITASLALRDHLFDELEHKKKLTFKAMRAILRKQGVVDYPVGFNLESDNRDHLIGNLTSCIMRDAKKMIGSAWDRLDEEEQDSFILMLQDDQKGDDEVRSILTQQYGLSDDVAEDCLDVRLPDGHGSLSKKAIDRILPVLRDQGLIYYDAVKEAGLGEANLYDPYAALSDKLDYYGKALAGHVMGASGKFEDSDEKRYGTISNPTVHIALNQVRAVVNELIRLHGKPDEVVIEIGRDLPMGADGKRELERFQKEGRAKNERARDELKKLGHIDSRESRQKFQLWEQLAKEPVDRCCPFTGKMMSISDLFSDKVEIEHLLPFSLTLDDSMANKTVCFRQANRDKGNRAPFDAFGNSPAGYDWQEILGRSQNLPYAKRWRFLPDAMKRFEADGGFLERQLNDTRYISRYTTEYISTIIPKNKIWVVTGRLTSLLRGFWGLNSILRGHNTDDGTPAKKSRDDHRHHAIDAIVVGMTSRGLLQKVSKAARRSEDLDLTRLFEGRIDPWDGFRDEVKKHIDAIIVSHRPRKKSQGALHNDTAYGIVEHAENGASTVVHRVPITSLGKQSDIEKVRDPLIKSALLNETAGLSGKSFENAVQKWCADNSIKSLRIVETVSIIPITDKEGVAYKGYKGDGNAYMDIYQDPTSSKWKGEIVSRFDANQKGFIPSWQSQFPTARLIMRLRINDLLKLQDGEIEEIYRVQRLSGSKILMAPHTEANVDARDRDKNDTFKLTSKSPGKLQSASARKVHISPTGLIREG

SEQ ID NO: 143 - protein, 1270 aa, Mycoplasma gallisepticum
MNNSIKSKPEVTIGLDLGVGSVGWAIVDNETNIIHHLGSRLFSQAKTAEDRRSFRGVRRLIRRRKYKLKRFVNLIWKYNSYFGFKNKEDILNNYQEQQKLHNTVLNLKLEALNAKIDPKALSWILHDYLKNRGHFYEDNRDFNVYPTEELANYFDEFGYYKGIIDSKNDDDDKLEEGLTKYKFSNQHWLEEVKKVLSNQTGLPEKFKEEYESLFSYVRNYSEGPGSINSVSPYGIYHLDEKEGKVVQKYNNIWDKTIGKCSIFPDEYRAPKNSPIAMIFNEINELSTIRSYSIYLTGWFINQEFKKAYLNKLLDLLIKTNSEKPIDARQFKKLREETIAESIGKETLKDVESEEKLEKDDHKWKLKGLKLNTNGKIQYNDLSSLAKFVHKLKQHLKLDFLLEDQYTPLDKINFLQSLYVYLGKHLRYSNRVDSANLKEFSDSSRLFERVLQEQKDGLFKLFEQTDKDDEKILTQTHSLSTKAMLLAITRMTNLDNDEDNQKNNDKGWNFEAIKNFDQKFIDITKTNNNLSLKQDKRYLDDQFINDAILSPGVKRILREATKVFNAILKQFSEEYDVTKVVIELARELSEEKELENTKNYKKLIKKNGDKISEGLKALGIAEDKIEEILKSPTKSYKVLLWLQQDHIDPYSQKEIAFDDILTKTEKTEIDHIIPYSISFDDSSSNKLLVLAESNQAKSNQTPYEFINSGKAEITWEVYEAYCHKFKNGDSSLLDSTQRSKKFAKMMKTDTSSKYDIGFLARNLNDTRYATIVFRDALKDYANNHLVEDKPMFKVVCINGGVTSFLRKNFDPKSWYAKKDRDKNIHHAVDASIISIFSNETKTLFNQLTKFADYKLFKNTDGSWKKIDPKTGVVSEVTDENWKQIRVRNQVSEIAKVIDKYIQDSNIERKARYSRKIENKTNISLFNDTVYSAKKVGYEDQIKRKNLKTLDIHESAEENKNSKVKKQFVYRKLVNVSLLNNDKLADLFAEKEDILMYRANPWVINLAEQIFNEYTENKKIKSQNVFEKYMLDLTKEFPEKFSEAFVKSMIRNKTAIIYNVEKDVVHRIKRLKILSSELKENKWSNVIIRSKNESGTKLSYQDTINSIALMIMRSIDPTAKKQYIRVPLNTLNLHLGDQDFDLHNIDAYLKKPKFVKYLKANEIGDEYKPWRVLTSGTLLIHKKDKKLMYISSFQNLNDLIEIKNLIETEYKENVDSDPKKKKKASQILRSLSVILNDYILLDAKYNFDILGLSKNKIDEILNSKLDLDKIAK

SEQ ID NO: 144 - protein, 1204 aa, Prevotella ruminicola
MERILGIDTGTNSLGWAIVDKDENQYHLVAKGTNIFSEGVKIEKGIESSKAAERTEHRSVRKHYWRRKIRKIRLLTILSDNDLCPRLKHEQLRQWRLKKVYPTDDTFMEWQRTEDKAQVNPYKFRYICLTQKLDLSDITQRFILGRALYHLNQRRGFLSNRKEATKESEGTVKEGISSLSKDMKDSGCEYLGEYFYQLYQQGKKIRNHYTARKEHYLKEFKAICSKQELDDALIEKLEKAIFDQRPLKSQKGQVGTCTFEKGKSRCPSSHPLYEDFRMYSFINNIKVQVDTLYDKGERSLTDEEKQLIIPLFKRKSKRTFPFEDIAKKIAGKNNYCYIKSNEEKAYKFNYQMDTQVSGSPVNAQLEEIFGEDWLSSVCEVYTLANNKSRFQIMNDVWHVLFFYDDEDKLKEFAKDRLQLDDELAEKFSKISIPNDYAALSLKAIRKIMPYLRDYGLIYSEAVFLANLVDVLPQHVWGIKEMREAAIENVIDVMHSYDKNNIDGITLEGCVKTFLKERYQVSDDNLKKLYHPSMLDPYPRQRPNDEGVFQLGSPRISSVKNPMAMHSLFRLRKVVNLMLKKGYITPDTKVHIEFSRDLNDANKRWAIQTWQRENEKERERCRKEIEKYIASPSDTDILKYQLWEEQNHKCLYTGDEIRITDFLGDNPKYDIEHTIPRSAGGDSTKMNLTLCSSRFNRDEKKTKLPAELVNHDEILERISNWKEKYEDIDKQIRKISTKGATSKEDKDSKIRRRHYLILQRDYWRGKYQRFTMTEVPEGFSRRQGTDISVISRYARMYLKSVFKQVYIVKGIATSDFRKMWGIQDEYAKKERVNHVHHCIDAITIACIGKAEYDKLADYRHQYDDYLFQGKTKPTFDKPWPSFVIDIKHIQDELLIAHYAKDNLEKFTKKNLRGKDGRIIRDKFGNKLQMKGDTSRNSLHNDKFYGAINHEGEIKYVYRTNIEALDAKSIGNIVDPTVRSIIESAIAIHGSLKAAINKGIWMNEEKHIPIKKVRVFRNDVKKPIELKDQRDLSDKDYKQHYYVTNDGNYMMLIFSKLNNKGREIRQHVVINSLEATEVIKSHKRSQVGKVVWESYYSKEGFDLIYKLKSGTMILLYENNRDEVWDLDIRNLQKRLYIITKMKYDGRIYMMHHQEAREKKDLEEKSGSFKINEDYRPLIVNSYNQFNALVQDLDFEINDLGEIRRLI

SEQ ID NO: 145 - protein, 1178 aa, Scardovia inopinata
MGKRHNSNMAKKKISYRIGIDVGLNSTGLAAIEVDDDGAPIRILNTMSVIHDGGVDPDAAKVRGTRLAISGIARRTRRMRRRRAKRLDRLEQILEKYGYTDTEPVLEEPYGPWICRAELADGFINDDEQRRMMIGIAIRHIARHRGWRNPYQNVRALLNIDDSDLSEEYKNLKEKVQDQINDGKDLPNFTPSQLVRDYLDNFSGQPAARIRTGKAGPRGNRRDAVGILPQRMRQSDYAYELQRIFDMQKIGRDEAQELLMAVFEAKSPKGSAEKRIGKDPLTGKKRALKASLAFQKYRIVATITNLRIKTGTGSERMLSPTELNDIYTYLLRVQDDNHLPTWEDICEEVLHIGRYQLAGIGKTFEGGERISNMPPVIQTSLAIHGLSEGTLAEKLTKWWDKADDDSRESMIKLLSNTVDIDRVNEVDENFASALDFIDSLDDEELTKLDKIALPRGRAAYSEEALNKLTADMLNTGDDLFSARQRIYHVNNSWRPPQPPIGEPLGNPAVDRVLKITNRYLMNCLNRWGQPRRVTIEHTRSGFTSVKQATEHQKISDKRAEYRRDIVKQLEEAGVESVHEYDIRRWEAVQRQNGQCLYCGRDITFKTCEMDHIVPRKGPGSTNTRTNFAAVCPECNRMKSNIPFASWAETKEAKDRGVSLDKAIKQVRFFNFTKNEYSPQAQRNFKKSMIERLKQKTSDEPLDNRSIESVSWMADELYKRIDWYFNHEQYETSKKAINDDKDNLSGTQVVVYPGSITAEARNAAGLGGNIHFIGGRYKTRLDRRHHAVDACVIAMMEPGIARILTERNQLRQAQRLTARIEDDEVNWKDYPTENTAGYNKYQAWSDRMHALLEYMNNALDYDKIPVVRWERLQLGNRSAHEDTIHPLKKLPLSHEISAIDINHASTPALYEALVSLPDFSEQDGLPADPSRQINVNGERYSGDDLVSFFNSNAAQIAIQGGSAELGTAFHHARIYRCWTVGKNGKKKIFFGMIRVYQHDLLHAKNEDLFTYPLKRSSVSMRYAKKEVVHAILSGNAEYVGYLCVGDELVLDLKGDKSNDEGGSRLSGQVGEFVQKFEEDSKVNSQIVNRWTVDGFPDEAKLRLRPSMFAGEGLKNMKSELVENAAIKNILSKTGWRVSVDVISKKSPVVLRRNAFGEPRWKTNAGLPVSYRWQDTETKE

SEQ ID NO: 146 - protein, 1371 aa, Gordonibacter pamelaeae
MNLRNVESYQVGLDIGTGSVGWAVLDDNGDLCRFKGKPTWGSRVFPTAETAAEARVHRGQRRRYDRRRQRIDLLQRFFADEVAKVDPEFFIRLNQARLHPENRDPAHADYRWPLFNGSNFTEKDYYRQFPTIYHLRAHLLKSDEPADIRLVYLALHNIVKHRGNFLHQDNPSLSARNANVGDAVEALCLALDEWCGAHDVECACDEAALAEALGDASLRPGEKRERAEAALGVEKAHKKLAKAVSSAVVGYAAEFGHVFFAESEGSKFALSNDEKVEAYVCPDEGRDLFDAMRAVHSSYVLMGILSEAQGELLSVCKVGEYERYKRDLETLKSLVRAYGPERYDEFFCGPFYEGTRDYDPGKAQGYTKYNLGASKLSHEDFLKEVQKLLKDIGAQADERYADIERAIEAGAFLRRLKTSDNGTIPYQLHLEEMDAIIERQAAFYPFLAQEKDKLKSLVSFRIPYYVGPLTQKNAARDGKGEARFAWSSRKPGMEDARVYPWNWEDVIDKDQSAEDFIRRMTGTCTYLKGEPVLARCSLDYELFCVLNELAGARWTQDGDKSYRFDAADRLGIVEDLFKKRKRVTYEAAEKWLARTHGPESGKSAGGAYHVSGGQGEDAFESQLSSHYDFCKILGVDELSDADEAMAEDIILWNTVFEDRSILKRKIKLAYGDRLGDAQVRKLCQKRYTGWGRLSGELLRGLRSATDNGPKTIMDILLEGDPNHARRMGAAMNLMEILHDDLLEFQAKIDEHNRERALAVGGMSVDEVTGSPALRRGINQALRVVDEIAGIAGKPPAHIYVEVTRDEGARNKGRRTTSRYRALEAALSSIKAQCADVYAELKERDPRALDDERLTLYFMQCGKCMYSGDALDINKLQTYQVDHILPQSYVKDDSFENKVLVRPDTNQRKGDTLLLDERLIARMRGFWRTLRDAELIGEKKFNNLTRTSVSDEQMKKFVSRQLVETGQMVKQVQQLLQARYPESEVQPVKAGVSHQLRVGCALAKSREINDFHHAHDAYLACQVGRFVQYRHSAVYSEPVKMAAVVKQFIKKQAEDYRRTRELPGSDGFIVSSFMTPGFDVKTGEVFRDAWDAGAEIDRIRRCFDYKDCFISRMPEETHGAFWDATIYSPRAAGKTLSLPLKRGLDPRKYGSYSREQFAYFFVYEAVKPKKKQRVLEFAPVPVRVASALANDPDALEDYARELAEAEGLVFERIRRRKVYKYQQIIVGDSRLYVTGREEVRNARQLAFSQDETKLICRIEQGEECEEGELLDLFRSMQRKYLACAPRLARLMKVAEMEEGFIAATASGKREVLLSLTSIAAAHRNSIDLKPIGRKGSSGQMKITFSKELSTNGILFVDSSVTGMFERRCRLGL

SEQ ID NO: 147 - protein, 1388 aa, Zunongwangia profunda
MKRILGLDLGTNSIGWALVNEAENEKEISKIIKLGVRVNPLTIDEKTNFEKGRPLSTNADRTLKRGARRNLQRYKLRRENLIEILIDNHIITKETPLTEIGKGTTYQTLSLRAKAVRERIDLEDFAKVLLAINKKRGYKSSRKASNDEEGQAIDGMAIAKELYERGITPGQYVLELLENDRKYIPDFYRSDLKQEFNKIWNNQKTFYPEILTDELFKELDGKNKSQTWAICQKPFNIKGIKRITKGREKTIENYHWRVKGLSGKLNLEKLAIILQEINNDINQSSGYLGGISDKSKKLYLNKETVGEFLYKQIAKNPHTSLKNQVFYRHDYLDEFEQIWKTQSNFNANLTDELKQEIRDVIIFYQRKIKSQKSLISFCQFESWEQEYFDKETGKTKTRTVGRRVIPKSSPLFQEFKIWQNLNHLVFTNSETDEKIEIKEVEQEIRKELFEELNLRGDLNPNDLLKILRSQFKIGKLSNWKCNFEKIEGNRTNAALFNIYQKISDFEGYGIDWNKSNAKKIRKELKATFPEIGIDASILEFDAYKKQLTNQSSYELWHLLYSAEEDFKISEQDKLIYGNSSVSLKKKLHLKFGFNPEYAKMLANLSLMSDYGNLSAKAIKKILPYLEDGHLYSEACRLAGYNHSKSLTAEELEKFEPKAKLDLLKKNSLRNPVVEKILNQMVNVVNQVIDTYGKPDGVRIELARELKKSAKERAEMTKGIADGTRRNEEIKKIITQKFGIPNPTKSDLVRYRLWQELESRGYKDIFTDKYISPDKIFSSEIDIEHIIPKALLFDDSFSNKTLSFRNVNLKKANRTALDFITQDYQSNVEAYKERVETWNKDNHISKGKRNKLLMSLKDIPDGFIERDLRNSQYIARKAKRMLYEVFPNEVLATSGSITDKLRSDWDLINVMKELNLPKYKALGLTEYEERLDKGTEELFKHEVIKDWTKRNDHRHHAMDALAVAFTTHNHIQYINNLNARKDITQDNHPIIKNIENLITEVNSKGKRVFKAPMSSFRESAKEQIEAILVSFKNKNKVVTKNINQTKKEGGFNYQNAKTPRGQLHKETIYGKSKQPLEKPVKINNRFCKKQVGLIINFKEQEAVLHHLKKYDNNEKIAFSNKTLKSDPIQVNGSPLREVKIFEEIFTIRKDINPDNFKTQKHLDKIIDKGIKEVMKKRLEEYNGDFKTAFSDLDKNPIWLNQSKGITIKRATISGVTNAEPLHQAKDHLGNIILDDNGKEIPIDYVSTGNNHHVAIYQDESGNLQEEVVSFYEAVIRKNQDQPIIKKRHPKGWKFLFTMKQNEMFVFSSENFNPSEIDLLDEKNAAIISPNLFRVQKIATKNYMFRHHLETEVTNNLDFTYRHFQATEWLRNLCKVRIDHIGRIVQIGEY

SEQ ID NO: 148 - protein, 1082 aa, Methylosinus trichosporium
MRVLGLDAGIASLGWALIEIEESNRGELSQGTIIGAGTWMFDAPEEKTQAGAKLKSEQRRTFRGQRRVVRRRRQRMNEVRRILHSHGLLPSSDRDALKQPGLDPWRIRAEALDRLLGPVELAVALGHIARHRGFKSNSKGAKTNDPADDTSKMKRAVNETREKLARFGSAAKMLVEDESFVLRQTPTKNGASEIVRRFRNREGDYSRSLLRDDLAAEMRALFTAQARFQSAIATADLQTAFTKAAFFQRPLQDSEKLVGPCPFEVDEKRAPKRGYSFELFRFLSRLNHVTLRDGKQERTLTRDELALAAADFGAAAKVSFTALRKKLKLPETTVFVGVKADEESKLDVVARSGKAAEGTARLRSVIVDALGELAWGALLCSPEKLDKIAEVISFRSDIGRISEGLAQAGCNAPLVDALTAAASDGRFDPFTGAGHISSKAARNILSGLRQGMTYDKACCAADYDHTASRERGAFDVGGHGREALKRILQEERISRELVGSPTARKALIESIKQVKAIVERYGVPDRIHVELARDVGKSIEEREEITRGIEKRNRQKDKLRGLFEKEVGRPPQDGARGKEELLRFELWSEQMGRCLYTDDYISPSQLVATDDAVQVDHILPWSRFADDSYANKTLCMAKANQDKKGRTPYEWFKAEKTDTEWDAFIVRVEALADMKGFKKRNYKLRNAEEAAAKFRNRNLNDTRWACRLLAEALKQLYPKGEKDKDGKERRRVFSRPGALTDRLRRAWGLQWMKKSTKGDRIPDDRHHALDAIVIAATTESLLQRATREVQEIEDKGLHYDLVKNVTPPWPGFREQAVEAVEKVFVARAERRRARGKAHDATIRHIAVREGEQRVYERRKVAELKLADLDRVKDAERNARLIEKLRNWIEAGSPKDDPPLSPKGDPIFKVRLVTKSKVNIALDTGNPKRPGTVDRGEMARVDVFRKASKKGKYEYYLVPIYPHDIATMKTPPIRAVQAYKPEDEWPEMDSSYEFCWSLVPMTYLQVISSKGEIFEGYYRGMNRSVGAIQLSAHSNSSDVVQGIGARTLTEFKKFNVDRFGRKHEVERELRTWRGETWRGKAYI

SEQ ID NO: 149 - protein, 1186 aa, Gardnerella vaginalis
MEGNISYAIGIDVGLNSVGLAAIRLDNNGEPIRILKAMSVIHDAGIDPNGAKESDTRKAISGVARRVRRLYRQRRRRLQKLDFLLHSLGFPVVENKDLDFSDSFTPWIFRAKLADEYIADEKQRKQMLSVAIRHIARHRGWRNPYQSIKSMTQETEYSEFYNELLKNIEKFAPGVSCEGSTPAQLVRDYLLSQQGKASRRLRITTDDRRKNHPNSLDPVLPRKLMQSDNMLEILNIFNVQHIDNKYVREQIINAVFYAKSPRGSAENRVGKDAITGKGKRALKASLAFQKYRIISTISNLRIRENSKERCLTIEEKQSVYKLLTTSTDEYSKEKSAEAPLYTWIDVADCLGIERYKLRGVGSQIEDGESVGNRPPMLNSELAILYANAKSLKQSLITWWLAANRTQEDKEAFIEILSNTVDIEAIHDNPEYQDKYGSVIAFIDSMDETEIAALENISLPNGRAAYSLETLDKLNKQMLETDDDLFEARKKLFNLPNNWRPSEAPIAEPTGNPSVDRVLKIVHRFLISAKNRWGNPERINIEHVRSGFQSKKMANSYKKLLDKRTEGKENLKAMMRNSLHLGTSDSISDADIRRYEAVQRQNGQCLYCGSEITYHTCELDHIVPRKGPGSTNTRENLVATCSSCNAQKCNTPFATWCEESTYCKNHDISVDSAINRVRAFIFPPNSYDKRGASQFKKEVIARLKQKVGDEAFDNRSIESVAWMANELHRRIDWYYNSQNYQTNNGISDITNKAQTNVGVYAGSLTAIARRMSGIDGKLEFFDGRRKTRFDRRHHAVDASVIAMMTPGIAQILAIKCNLRETQLLQGNKVVPGGIDWKEYPTANDQGYQQYANWSVRMNALLELLNEEMRADRIAVVNSIRLRYSNSSVHKDDVHALLKLHVGDEIDSETIRRASTPALYCALTRNPDYDVNNGLPENTDRTILLHDKKLNADDSITFFKSKAAQLFVREGSVEIGNSIHHLRIYEYFEKLKSGKVKKSYGMIRVFQDDLHRYIHEDLFSCDLPEQSISMRYADTKVAHAVQTGNANYLGYLVPGDEIIVDFSHVKLSGYIGEFVEFLNKIGANCAAYKHWVVAGTDDKTTLILKPSMISSEGIDKLYSNCERNNFDYASYEKSIDKILVDKGWRVSVNVLDQYKAATIRRNALGEPRWASRSHLPISWSWDTGENRE

SEQ ID NO: 150 - protein, 1434 aa, Bacteroidetes oral
MKNILGLDLGTNSIGWAYVKQAQNDSEKSEIAELGVRVNPLTVDEKTNFEKGKPISTNADRTLKRGARRNLQRYKLRRQELIELLKDYQVISDKTILAEDGKETTFETLRLRVKSAKEQVSLEELARILLMINKKRGYKSSRKAKNEDEGQLIDGMEIARRLYDENLTTGQLSLQLLKEGKKSLPDYYRSDLQHELDKVWNFQKQFHPDILTDEFYTSIQGKGQKATRESFSSKYGIDTAENKGSREEKKLQAYQWRADATHKELTKEELAFVITEINNNINNSSGYLGAISDRSKELIFANETVGEYLWKQIQNDPHTSLKNQVFYRQDYFDEFERIWETQSGFYPQILTESLKNELRDILIFYQRKLKSQKALVSICEFESKEIPLKDKQGNPISKNGIPVTKLVGPKVAPKSSPLFQEFKIWQNLNNVLVRPKGSRKRKVTTNQQSTLLEGQEPVFELNLEQKELLFEELNLKGNLKTDYCLELIGYSAKEWEMNYPTLEGNKTNKALYEAYLKIIDSEGYDAKKLLKVKTDKDDINLDDIKVSASEIKTMISDIFNELGINTKILDFDAELERKQFEAQASYRLWHLLYSYEGDDSKSGNELLYRLLEDKFGFKREHSKTLANVSLLSDYGNLSTKAIRTIYPYIKENKFSTACELAGYRHSKLSISKEENENRTLKDTLDVLKKNSLRQPVVEKILNQMINLINELIEKHSEKDEKGNIVKYFKFDEIHIELARELKKNAEERRELDSKVREGKDRNEKIITILKSEFGLPYPTKNDITRYRLYEELKDNGYKDLYTNTYIPREKLFSKEIDIEHIIPKSRLFNDSFSNKTICYRQDNLNKGERTAYDYIEGLGKTQLDEYLNRVENLYTNKFITKAKYRNLLKKESEIGDGFIERDLRETQYIAKKAKEMLLQITRHVVSTTGSITDRLRDDWELVNVMRELNLPKYKVLGLTEIQERKNGQTVEVITDWTKRNDHRHHAMDALTVAFTKHSHIQYLNFLNARKDEKHKEYSNIMGIQQLETEKTTDKDGKDRRVFKTPIPNFRQVAKEHLESILISHKTKNKVVTRATNKIAGSKKQQETLSPRGQLHKETVYGKYRRYVQKEEKIGSKFDLQTIERVANPLYKRLLTKRLEENGGDPKKAFTGKNALAKSPIYLDETQTQQLPEKVKLVWLETDFSIRKDITPDNFKDEKSIDKVLDEGIKRILKDRLKSFDGDAKRAFTDLEQNPIWLNKEKGIAIKRVTISGVSNAEPLHTKKDHLGNEIFDDTGKPIPVDYVSTGNNHHIAIYRDENGNLQEKAVSFFEAVTRANQGLPTVDKTYNQHLGWQFLFTMKQNEMFVFPNKETGFDPQEIDLLDPKNKKLISPNLFRVQKISTKNYFFRHHLETSVETHNALNGVTYKSQLGLNGITDIIKVRINHLGDIVHIGEY

SEQ ID NO: 151 - protein, 1341 aa, Peptoniphilus sp.
MWGSRLFEEASTAQDRREHRSNRRRLERRKYRLDLLEELFVEEINKIDPEFFIRLRESKFHFEDRSLKNTFILFNDKMEGGYNDKVFFSKYPTIYHLRSALINGNKEDVRAVFLAIHNILKNRGHFLLAGNDINISLSLNDTLTDLFEYLKIHLGIEVEFENKLKDIEKIALDKNLSKSDKQKKIVQLLETDYKKQLADVFKLSLGLTANMENIFGKENEQGLEFINAENKIKKIQFDSSYEENIAEFDQFYGEYFEIIDICKKIYDAISLSQILVDGKGLSESKVLSYEKHKEDLKLLKKVLKNIDKAYDNKGEDRLVYKVLKEDKDKGTNYVNYSKLSNNGTATTKEEFYKFLSKNLDLKKFGKLNKEDIETLDYINSEILLGRFLPLQKEKINGVIPYQLQMKELTQILNNASKYLPFLNKIEDGMTVKDKIISLIKFRIPYYVGPLNEYNRIENGNGFAWIEKKKNEKIFPWNFNDVVDIEKSAEKFINNLTNKCTYIKEETVLPKNSIIYSKFMVLNELNNLQYGNKKLDIELKMKMYTDLFLEKKDNRKVTEKRILEYFRINGINDGKEKLTGLNNEIHADMKSYRDMCEIMGENFNINVAENIINWITVFHGEKKILINKIKNVYGKMFNDEQISKLSKLNYSDWGRLSKKLLTDIKCYIDADGINFPVSILEAMEVSNKNLMELLSNKYEFISCIDDINNKYFGDRDISASELIDELYVSPAVKRGIWQSVRILEEIVSIIGHNPKKIFIEMTRHNEEKVQKSSRRHNLEELYKAIRKDPEYVELIKEFDSTTDTDSFKIKKLYLYFMQLGKCAYSKEKIDFDKLFTDSYDIDHIYPRSKTKDDSIHNNLVLVKAKYNREKTDVYPIDINIQKNMNSFWNFLYTKKFITEEKYKRLIRTSDLTDEELAKFISRQLVETSQSTKATAEVLKQIYGDSDICYVKAENVSDFRYGSSRQKDKNDIQKLFVKCREVNHFHHAKDAYLNIVVGNVYDVKFTKNPVNFIKKNKMGNKSNYSLNHMFCFDVERNGYKAWDSSETIKTVGRMMKSNDVRITKHVHPTRGELYDATIYKAKIAKTGSYMPLKSSKNTPLSDVTKYGGYTKIKIAYYSVYKYKFSDKNLIKTEIRLIPIPIYLSKNDDDIKEYVKNYLNDRVNSKLIDFTKIYDKLYVNSLIKINGYLYYLGGKTNDRVWIDNAVSIVLDDKIEYLIKRISNDIKYGYEINVSDDELMDIYESLAEKANKKIFYNRLSDFEKIFSNMDVKKKFVKLEKNDKCRVLLQLLNVLTDSQTTYKLEMVGLKHSRSNIGMKISNLEEFKVINSSITGLYSNEIDILNI

SEQ ID NO: 152 - protein, 1391 aa, Lactobacillus gasseri
MTKIKNEYIVGLDVGTNSCGWVAMDFQNTILRMHGKTAIGSHLFDAGNSAADRRAFRTTRRRIKRRKWRLKLLEEIFDPYMTEVDPYFFARLKESGLSPLDKRKNVSSIVFPTALEDKKFYCNYPTIYHLRYDLMSEDKKFDLREIYLAIHHIVKYRGNFLYNTPVKDFEASKIDVKDSLEKLNELYERLDSEFTVELDSSNALEIEKIIRDKKVFKINKVKSIHQLLSLKTENKERTKLIKDVSKQIINAILGYKTKFETILLKNISKDEADDWEFKLTDVDADNKFENLIGDLNENEQEILLEIRNLANAITLSNIVEEGKTLSESMIDKYNKHSDDLELLKQVISDHPDRDKAKKLALAYDLYVNNRHGKLLQAKDVLGSKKTLSKEDFYKEVKKNLDDSKASQEILDTIALDSFMPKQRTNENGVIPYQLHQLELDRIIKNQGKYYPFLKEVNPVSSHLKEAPYKLDELIRFRVPYYVGPLISPNESTKNKQTKKNQNFAWMIRKEQGQITPWNFDQKVDRMASANKFIKRMTTKDTYLLGEDVLPANSLLYQKFTVLNELNNIKINGKRISVPLKEELYNNLFKKNSTVTTNKLKSYLKENYNLINVEIKGLADEKKFNSGLTTYNKLRNLKIFDQQLDDLNYDKDFERIIEWSTIFEDKAIYKDKLKTIKWLSDRQIDKLSKIRMQGWGQLSKKLLSQLTDNNGQTIIEQLWDSQNNFMQIVNQSDFKDAIAVANQNLLVNTSVEDILNEAYTSPANKKAIRQVVKVVDDIVKAASGKVPKQIAIEFTRDADDKAKISQTRANKLRKVYKELSNELASETIRNELERVAKDQKLLKDKYYLYFMQLGRDAYTGEPINIDDLGQYDIDHILPQSFIKDDSLENRVLVKKAVNNGKSDNVPVKLYGNRMAADLGMTIRHMWEKWKDQGLITKTKYNNLIIDPDKINKYESSGFIHRQLVETSQIIKLVSTILQSKYPDTEIIVVKARYNHYLRKHLNLYKSREVNDYHHAIDAYLSAICGNLLYQVYPYLRPFFVYGQYKKFSSDPKKEKIIYDKTRKYNFISQIFENKSNDIISLETKKKVFDKKDIIEKLKHAYNYKYMLVSRETETHDQEMFKMTVYPRLSRDTKKSRNLISKKKDMPTEIYGGYTNNSDAYMVIARINKKKGTEYRVFGVPMRELVNLRKAEKNGRYNAYLKQVLEPEIMYSKNGKKNKTISSFEIVKAKVPYKQVILDGDKKFMLASSTYVQNAKQLTLSQNSMQAITDNCENDTEEEKALEEKALIEAYDEILTNIDKYLPLFDINKFREKLHAGREKFINLSLDVKKDTILQVLNGLHDNAVMPKIKSLGLSTPLGFMQFSSGVPLSENAKLIYQSPTGLFEKRVKISDL

SEQ ID NO: 153 - protein, 1426 aa, Sphingobacterium spiritivorum
MKHILGLDLGTNSIGWALIKQDFENKQGEILGMGSRIIPMSQDILGDFGKGNSVSQTAERTKYRSVRRLRERFLLRRERLHRILNVLGFLPEHYASQIDFTKRFGKFKEETEPKLVYSNEGFIFKKSFEEMLSDFKTHQPQLLEDNKKIPYDWTIYYLRKKALSRKIEKEELAWILLNFNQKRGYYQLRGEEEEENPNKLIEFYSLKIVDVLADEPQKGKSDIWYSLILENGWIYRRSSKTPLFDWKEKTRDFIVTIDLNDDGSVKTDKEGNEKRSFRAPGENDWTLVKKKTEQEIDSSRKTVGTYIYETLLKNPKQKIKGKLVRTIERKFYKTELKQILEKQKEFHPELRQDDLYSDCVRELYKNNEAHQLTLSKKDFVHLFMEDIIFYQRPLGSQKSSISNCTLEFRKYKDENGTEHTQYLKAIPKSNPYYQEFRIWQWMYNLNIYKKEDDTNVTKDFLNTKADFESLFEFLNNRKEVDQKALLKHFKLNDKTHRWNYVEDKKYPCNETKTMILSRLDKVENISDDFLTREMEQKIWHIIYSVNDKVEYEKALKSFAGKNNLEDNSFFEAFKKFPPFKSEYGAFSEKAIKKLLPLMRMGKFWNYNNISEQSKSRIQKIITGEYDENIKDKVREKAIHLTTETDFQGLQLWLVQYIVYGRHSEAAMLGKWNSADDLEEFLKEFKQHSLRNPIVEQVITETLRVVKDIWQKYGNGAKDFFREIHIELGREMKLPAEERERLTRQISENENTNFRIKALLAEMMDDNSVENVRPFSPMQQEILKIYEEGVLNSDIEIEDDILKISKTAQPSSSDLKRYKLWLEQKYKSPYTGQIIPLNKLFTPEYEIEHIIPQSRYFDDSFTNKIICESAVNKLKDNYIGLEFIKKLGGSIVECGNGKSVAILKHDAYEDFIKKHYANNRSKRNKLLLEDIPEKMIERQMNDTRYISKYISGVLSNIVRVEDGTDEGVNSKNIVPGNGKITTQLKQDWGLNDVWNDLILPRFERMNHLTNSTDFTAWNENHQKFLPTVPVEFSKGFSKKRIDHRHHALDALVIACATKDHVNLLNNQSAKSDTKRYDLKKKLMKFEKVAYNHPQTGERIEREAPKQFLKPWETFTIDAKNHLETIIVSFKQNLRVINKATNYYEKYVEKEGTKVKERVEQKGTNWAIRKPMHKETVSGKIDLPRIKVPKGKILTATRKSLDTSFNLKTIGSITDTGIQKILKNYLQYKDNNPELAFSPEGIEDMNKNIEKFNNGKAHQSISKVRVFELGSKFPLGQSGNKKEKYVEAAKGTNLFFAIYQDKNGKRSYETIPLNEVIERQKQGLSVVDLKGVDDFYLSPNDLVYVPSEDELENISMIDFNKMSSERIYKVVSFTGNQIFFVRQDIATSVVNKAEFSTLNKMERAIDGTMIKETCVKLQIDRLGNISKI

SEQ ID NO: 154 - protein, 1361 aa, Lactobacillus casei; identical to SEQ ID NO: 70

SEQ ID NO: 155 - protein, 1436 aa, Bacteroides fragilis
MKRILGLDLGTNSIGWALVNEAENKDERSSIVKLGVRVNPLTVDELTNFEKGKSITTNADRTLKRGMRRNLQRYKLRRETLTEVLKEHKLITEDTILSENGNRTTFETYRLRAKAVTEEISLEEFARVLLMINKKRGYKSSRKAKGVEEGTLIDGMDIARELYNNNLTPGELCLQLLDAGKKFLPDFYRSDLQNELDRIWEKQKEYYPEILTDVLKEELRGKKRDAVWAICAKYFVWKENYTEWNKEKGKTEQQEREHKLEGIYSKRKRDEAKRENLQWRVNGLKEKLSLEQLVIVFQEMNTQINNSSGYLGAISDRSKELYFNKQTVGQYQMEMLDKNPNASLRNMVFYRQDYLDEFNMLWEKQAVYHKELTEELKKEIRDIIIFYQRRLKSQKGLIGFCEFESRQIEVDIDGKKKIKTVGNRVISRSSPLFQEFKIWQILNNIEVTVVGKKRKRRKLKENYSALFEELNDAEQLELNGSRRLCQEEKELLAQELFIRDKMTKSEVLKLLFDNPQELDLNFKTIDGNKTGYALFQAYSKMIEMSGHEPVDFKKPVEKVVEYIKAVFDLLNWNTDILGFNSNEELDNQSYYKLWHLLYSFEGDNTPTGNGRLIQKMTELYGFEKEYATILANVSFQDDYGSLSAKAIHKILPHLKEGNRYDVACVYAGYRHSESSLTREEIANKVLKDRLMLLPKNSLHNPVVEKILNQMVNVINVIIDIYGKPDEIRVELARELKKNAKEREELTKSIAQTTKAHEEYKTLLQTEFGLTNVSRTDILRYKLYKELESCGYKTLYSNTYISREKLFSKEFDIEHIIPQARLFDDSFSNKTLEARSVNIEKGNKTAYDFVKEKFGESGADNSLEHYLNNIEDLFKSGKISKTKYNKLKMAEQDIPDGFIERDLRNTQYIAKKALSMLNEISHRVVATSGSVTDKLREDWQLIDVMKELNWEKYKALGLVEYFEDRDGRQIGRIKDWTKRNDHRHHAMDALTVAFTKDVFIQYFNNKNASLDPNANEHAIKNKYFQNGRAIAPMPLREFRAEAKKHLENTLISIKAKNKVITGNINKTRKKGGVNKNMQQTPRGQLHLETIYGSGKQYLTKEEKVNASFDMRKIGTVSKLAYRDALLKRLYENDNDPKKAFAGKNSLDKQPIWLDKEQMRKVPEKVKIVTLEAIYTIRKEISPDLKVDKVIDVGVRKILIDRLNEYGNDAKKAFSNLDENPIWLNKEKGISIKRVTISGISNAQSLHVKKDKDGKPILDENGRNIPVDFVNTGNNHHVAVYYRPVIDKRGQLVVDEAGNPKYELEEVVVSFFEAVTRANLGQPIIDKDYKTTEGWQFLFSMKQNEYFVFPNEKTGFNPKEIDLLDVENYGLISPNLFRVQKFSLKNYVFRHHLETTIKDTSSILRGITWIDFRSSKGLDTIVKVRVNHIGQIVSVGEY

SEQ ID NO: 156 - protein, 1517 aa, Bacteroides sp.
MKKIVGLDLGTNSIGWALINAYINKEHLYGIEACGSRIIPMDAAILGNFDKGNSISQTADRTSYRGIRRLRERHLLRRERLHRILDLLGFLPKHYSDSLNRYGKFLNDIECKLPWVKDETGSYKFIFQESFKEMLANFTEHHPILIANNKKVPYDWTIYYLRKKALTQKISKEELAWILLNFNQKRGYYQLRGEEEETPNKLVEYYSLKVEKVEDSGERKGKDTWYNVHLENGMIYRRTSNIPLDWEGKTKEFIVTTDLEADGSPKKDKEGNIKRSFRAPKDDDWTLIKKKTEADIDKIKMTVGAYIYDTLLQKPDQKIRGKLVRTIERKYYKNELYQILKTQSEFHEELRDKQLYIACLNELYPNNEPRRNSISTRDFCHLFIEDIIFYQRPLKSKKSLIDNCPYEENRYIDKESGEIKHASIKCIAKSHPLYQEFRLWQFIVNLRIYRKETDVDVTQELLPTEADYVTLFEWLNEKKEIDQKAFFKYPPFGFKKTTSNYRWNYVEDKPYPCNETHAQIIARLGKAHIPKAFLSKEKEETLWHILYSIEDKQEIEKALHSFANKNNLSEEFIEQFKNFPPFKKEYGSYSAKAIKKLLPLMRMGKYWSIENIDNGTRIRINKIIDGEYDENIRERVRQKAINLTDITHFRALPLWLACYLVYDRHSEVKDIVKWKTPKDIDLYLKSFKQHSLRNPIVEQVITETLRTVRDIWQQVGHIDEIHIELGREMKNPADKRARMSQQMIKNENTNLRIKALLTEFLNPEFGIENVRPYSPSQQDLLRIYEEGVLNSILELPEDIGIILGKFNQTDTLKRPTRSEILRYKLWLEQKYRSPYTGEMIPLSKLFTPAYEIEHIIPQSRYFDDSLSNKVICESEINKLKDRSLGYEFIKNHHGEKVELAFDKPVEVLSVEAYEKLVHESYSHNRSKMKKLLMEDIPDQFIERQLNDSRYISKVVKSLLSNIVREENEQEAISKNVIPCTGGITDRLKKDWGINDVWNKIVLPRFIRLNELTESTRFTSINTNNTMIPSMPLELQKGFNKKRIDHRHHAMDAIIIACANRNIVNYLNNVSASKNTKITRRDLQTLLCHKDKTDNNGNYKWVIDKPWETFTQDTLTALQKITVSFKQNLRVINKTTNHYQHYENGKKIVSNQSKGDSWAIRKSMHKETVHGEVNLRMIKTVSFNEALKKPQAIVEMDLKKKILAMLELGYDTKRIKNYFEENKDTWQDINPSKIKVYYFTKETKDRYFAVRKPIDTSFDKKKIKESITDTGIQQIMLRHLETKDNDPTLAFSPDGIDEMNRNILILNKGKKHQPIYKVRVYEKAEKFTVGQKGNKRTKFVEAAKGTNLFFAIYETEEIDKDTKKVIRKRSYSTIPLNVVIERQKQGLSSAPEDENGNLPKYILSPNDLVYVPTQEEINKGEVVMPIDRDRIYKMVDSSGITANFIPASTANLIFALPKATAEIYCNGENCIQNEYGIGSPQSKNQKAITGEMVKEICFPIKVDRLGNIIQVGSCILTN

SEQ ID NO: 157 - protein, 1399 aa, Olsenella uli
MNLRNTTDEYNIGLDMGTNSVGWAVTDKAGAIAHFKGKPTLGSRLFDAAQTAAGARIHRSQRRRYVRRRWRLDLLQSLFQDEVSKVDSEFFCRLRQSRLYVGDREKGHADYTWPIFNDSDFNEVDYYKRFPTIYHLRKWLMETDEKADIRLIYLATHNIVKHRGNFLRENNKSLSSRDANPAQAVKSLRLALNDWCSERDYECAWKGEEDDGAIDEAILNVLADGEKGRSDQAKEIAKLTGVDCGDAKQSKQCNEAIAKAIVGLKVEMKNIFGEFPAEKTSYIYLSSDEDVEAVRESCPDDSGELFQALCKLYSAYILQELLSYADPSGQTISANMVAKYKQYGRDLRLLKELTRTYAPQKYDLFFRGETYAGSSDYVVDEARGYTRYNLGTTKANYDDFQKSVKELFKGTDALQDERYQEMMVAFGEQKFLRRLKTSDNGSIYYQLHLEELHTILENQGKHYPFLLSEEDKIESLVSFRIPYYVGPLTRKNAAIGHDGKERFAWSSRKDGMEHAVITPWNWEEIIDRDKSAEDFIMRMTGDCTYLQGEPVLPKCSLLYEEFCALNEFNGAHWTVDGDDERRFDAAQRERIMCDLFRRTRSVTYNKVSDWLERKYNFTGARVRGGQGEHGFESKLGSYIFFCKDVFKTDGLDEADYTMIEQIILWSTLFEDRDILKRKIEEAYGGDRLTSEQIKVICKKRFTGWGRLSKRLLTDIKVNTDTGRKSIMDVLREGNPNNGQRSRTMVFMEVLRDEDLGFQKAIDGLNRDYFREHNNGLMDVNDLPGSPAIRRSINQAVRIVDEIASIARKEPTNIFIEVTREEDDPRKKGKRTKRRYDAIKSALEKFKKDDPSLWKELCEKAPGDMDERLSLYFMQRGKCMYSGRPIKIEELHTGKYEVDHIIPRSYIKDDSFENKVLVYREENQHKTDALLIDSSIRQKMGGYWRMLHDAKLVGDKKFRNLFRNHIDDKAMKGFVARQIVETSQMVKLVQTLFEARYPNTRIVPVKAGISHDLREAAGLVKCREANDFHHAHDAFLACRIGLFIQKRHPSVYDNPIGLARIMRDYARMQAREYKKSHCLAHTQGFIVNSFLSSGFDEETGEIFKDDWDAKAEVEGIRRVLNCRQCFISRMPVEGDTRYGGRYWGETIYSPKGKHKHEIPLKQGLDPNLYGGYSDLLYSYFLIYEASDVSSGERVLRFIGIPTSIAARMANQKRLEEYVSRLALQENLEHVRMVRKIMKKQLIEVDNCRLLVTAADAVTNATELAFSLDEMKIISTCAKCINGADPSAIDKIGNAQDSFFDNLKRRGSDRCALLFSQLKLDKLSQNFYMISSDDKSKILISILDRIRAKSNSVDLSLVGGAKHAAQMKFDFNAKLNNPASSFVLIDQSVTGMFERRTRIGL

SEQ ID NO: 158 - protein, 1398 aa, Veillonella atypica
METQTSNQLITSHLKDYPKQDYFVGLDIGTNSVGWAVTNTSYELLKFHSHKMWGSRLFEEGESAVTRRGFRSMRRRLERRKLRLKLLEELFADAMAQVDSTFFIRLHESKYHYEDKTTGHSSKHILFIDEDYTDQDYFTEYPTIYHLRKDLMENGTDDIRKLFLAVHHILKYRGNFLYEGATFNSNAFTFEDVLKQALVNITFNCFDTNSAISSISNILMESGKTKSDKAKAIERLVDTYTVFDEVNTPDKPQKEQVKEDKKTLKAFANLVLGLSANLIDLFGSVEDIDDDLKKLQIVGDTYDEKRDELAKVWGDEIHIIDDCKSVYDAIILMSIKEPGLTISQSKVKAFDKHKEDLVILKSLLKLDRNVYNEMFKSDKKGLHNYVHYIKQGRTEETSCSREDFYKYTKKIVEGLADSKDKEYILNEIELQTLLPLQRIKDNGVIPYQLHLEELKVILDKCGPKFPFLHTVSDGFSVTEKLIKMLEFRIPYYVGPLNTHHNIDNGGFSWAVRKQAGRVTPWNFEEKIDREKSAAAFIKNLTNKCTYLFGEDVLPKSSLLYSEFMLLNELNNVRIDGKALAQGVKQHLIDSIFKQDHKKMTKNRIELFLKDNNYITKKHKPEITGLDGEIKNDLTSYRDMVRILGNNFDVSMAEDIITDITIFGESKKMLRQTLRNKFGSQLNDETIKKLSKLRYRDWGRLSKKLLKGIDGCDKAGNGAPKTIIELMRNDSYNLMEILGDKFSFMECIEEENAKLAQGQVVNPHDIIDELALSPAVKRAVWQALRIVDEVAHIKKALPSRIFVEVARTNKSEKKKKDSRQKRLSDLYSAIKKDDVLQSGLQDKEFGALKSGLANYDDAALRSKKLYLYYTQMGRCAYTGNIIDLNQLNTDNYDIDHIYPRSLTKDDSFDNLVLCERTANAKKSDIYPIDNRIQTKQKPFWAFLKHQGLISERKYERLTRIAPLTADDLSGFIARQLVETNQSVKATTTLLRRLYPDIDVVFVKAENVSDFRHNNNFIKVRSLNHHHHAKDAYLNIVVGNVYHEKFTRNFRLFFKKNGANRTYNLAKMFNYDVICTNAQDGKAWDVKTSMNTVKKMMASNDVRVTRRLLEQSGALADATIYKASVAAKAKDGAYIGMKTKYSVFADVTKYGGMTKIKNAYSIIVQYTGKKGEEIKEIVPLPIYLINRNATDIELIDYVKSVIPKAKDISIKYRKLCINQLVKVNGFYYYLGGKTNDKIYIDNAIELVVPHDIATYIKLLDKYDLLRKENKTLKASSITTSIYNINTSTVVSLSNKVGIDVFDYFMSKLRTPLYMKMKGNKVDELSSTGRSKFIKMTLEEQSIYLLEVLNLLTNSKTTFDVKPLGITGSRSTIGVKIHNLDEFKIINESITGLYSNEVTIV

SEQ ID NO: 159 - protein, 795 aa, Prevotella disiens
MEKQRILGLDPGTNSLGWAVLDFDNSKQEYNLVRKGEVIFEEGVGKSKRGEFSKAAYRTFYKSTRKHYFRRRLRKIEVLKVLVKYDFCPYLSDDLLKQWHEKKIYPAVKEFMDWQRTSDAEGKNPYYDRHCCLNEKLDLSLKSDRYVLGRALYHLTQRRGFKSNRLIQNNDENEEGKVKKGISELSTEMQEANCNYLGDYFYKLYTEKGNTVQIRKRYTDREKHYKNEFNAICEKQELNETIVKELDKAIFFQRKLKPQRHGVGKCTFEPNNRRCAISHPDFERFRMLCFINNIKIKTPFEENLRPLNNEEKALIEPLFYRKSIKNFDFEEIAKKLAGKNNYCYIKDDSSKQYKFNYRMSQGASTCQTIAKLKSIFGEEWKNGIAETYTNRRKKEGLKKQAEMVDDIWNVLYSVSECDVLKDFAINKLQLDEKTADNFSKTKLAQGFATLSLKAIRKILPFLEQGFGYTEAVFLANIPTVVGKEYWNNEDIRNDIMEEIKTIFYHNTLKTNDSHNTILFCIKDILSNNFDLAPGAIDKLYHPSMINVYKDVIPNEDGILQLGSPKIDAVKNPMAMRSLHIIRKVVNELLREGIINSDTEVRIEYARELNDANKRHAIADWQKKQYGKHQKYRKEIKELFKAETGFEIEPNETDILKFELWEEQNHICLYTGQEIGISEFVGENPKYDIEHTIPRSLGGDSTKMNMTLCENKFNRENKQKKLPSELANHSEILERIDDWKKKIYILQKKYDSIRTHNGMDKENKDKKIVSMQVRISGSSICVYSQNTLLWLQYGYN

SEQ ID NO: 160 - protein, 1428 aa, Burkholderiales bacterium
MGKTHIIGVGLDLGGTYTGTFITSHPSDEAEHRDHSSAFTVVNSEKLSFSSKSRTAVRHRVRSYKGFDLRRRLLLLVAEYQLLQKKQTLAPEERENLRIALSGYLKRKGYARTEAETDTSVLESLDPSVFSSAPSFTNFFNDSEPLNIQWEAIANSPETTKALNKELSGQKEADFKKYIKTSFPEYSAKEILANYVEGRRAILDASKYIANLQSLGHKHRSKYLSDILQDMKRDSRITRLSEAFGSTDNLWRIIGNISNLQERAVRWYFNDAKFEQGQEQLDAVKLKNVLVRALKYLRSDDKEWSASQKQIIQSLEQSGDVLDVLAGLDPDRTIPPYEDQNNRRPPEDQTLYLNPKALSSEYGEKWKSWANKFAGAYPLLTEDLTEILKNTDRKSRIKIRSDVLPDSDYRLAYILQRAFDRSIALDECSIRRTAEDFENGVVIKNEKLEDVLSGHQLEEFLEFANRYYQETAKAKNGLWFPENALLERADLHPPMKNKILNVIVGQALGVSPAEGTDFIEEIWNSKVKGRSTVHSICNAIENERKTYGPYFSEDYKFVKTALKEGKTEKELSKKFAAVIKVLKMVSEVVPFIGKELRLSDEAQSKFDNPYSLAQLYNLIETERNGFSKVSLAAHLENAWRMTMTDGSAQCCRLPADCVRPFDGFIRKAIDRNSWEVAKRIAEEVKKSVDFTNGTVKIPVAIEANSFNFTASLTDLKYIQLKEQKLKKKLEDIQRNEENQEKRWLSKEERIRADSHGICAYTGRPLDDVGEIDHIIPRSLTLKKSESIYNSEVNLIFVSAQGNQEKKNNIYLLSNLAKNYLAAVFGASDLSQITNEIESTVLQLKAAGRLGYFDLLSEKERACARHALFLNSDSEARRAVIDVLGSRRKASVNGTQAWFVRSIFSKVRQALAAWTQETGNELIFDAISVPAADSSEMRKRFAEYRPEFRKPKVQPVASHSIDAMCIYLAACSDPFKTKRMGSQLAIYEPINFDNLFTGSCQVIQNTPRNFSDKTNIANSPIFKETIYAERFLDIIVSRGEIFIGYPSNMPFEEKPNRISIGGKDPFSILSVLGAYLDKAPSSEKEKLTIYRVVKNKAFELFSKVAGSKFTAEEDKAAKILEALHFVTVKQDVAATVSDLIKSKKELSKDSIENLAKQKGCLKKVEYSSKEFKFKGSLIIPAAVEWGKVLWNVFKENTAEELKDENALRKALEAAWPSSFGTRNLHSKAKRVFSLPVVATQSGAVRIRRKTAFGDFVYQSQDTNNLYSSFPVKNGKLDWSSPIIHPALQNRNLTAYGYRFVDHDRSISMSEFREVYNKDDLMRIELAQGTSSRRYLRVEMPGEKFLAWFGENSISLGSSFKFSVSEVFDNKIYTENAEFTKFLPKPREDNKHNGTIFFELVGPRVIFNYIVGGAASSLKEIFSEAGKERS

SEQ ID NO: 161 - protein, 1025 aa, gamma proteobacterium
MGGYMPQLMRYRLALDIGSTSIGWAMIRLSMQNEPIAIIRMGVRIFSDGRNPKDGSSLAVTRRVARQMRRRRDRLLKRKTRLLNALVQKKFFPEDADARKALVVLNPYELRKEGLYRQLSGPEFGRALFHISQRRGFLSNRKTDKKDNDSSVLKKAIVDLRQQLEVENCQTIGEWLFKQQQSGKSVRARLRGKTQKDKAYDFYIDRAMIAHEFDTLWVSQAKYDPLLFNEDARAILRDILLYQRPLKPVKPGRCTLIPDESRAPLALPLTQQARIYQELNHLRITTPALGAQALTVAQRNTIAALLEKSDVTFVKIAKALGLTSTTEFNLQDIKRDRLKGNATAIILARNQYFGRRWHDFNADLQNLIVDKLVNEGSETALIEWLKANTDVDESAAERVSGVTLPEGYGSLSVAALRRLLPALKEDVVVYSEAVKRAGFDSHSALSLIEQTGELYQELPYYGEVLQRHVGFGSGDPNDSPERRFGKIANPTVHIGLNELRKIINALIKRYGNPAEVVVELARDLKLSREKRKEIQEEQKQRQDRNEKRIKDACEILGIDPLVIDRGKRREISQKMQLWDELNPKDAANRRCPYTGDQISIEKLLSAEVEIEHILPFSKTLDDSLNNKTVAMRRANRDKGNRTPYEAFGESLNPDYDYDAILQRASLMPREKRKRFASDGYQQWLRDDKDFLSRALNDTAYLSRIAKEYLTLICPPNSVRAIPGRMTAQLRAMFGLNRLLSEGGIKNREDHRHHAIDAAVIGVTDQGLLQKFSRASARTRELQLSRLVDDMPLPWDTYREHVTRALEHLVVSHKPDHGYQGKMHEDTAWGLRDNGQVTRRVRSEDGGPRQRLLENKNVVKINSTRDFSRHGIDEQGQVNAYKGYVGGSNYCIEIWIDEKGKWNSDVVSTFQAYQIVRELGEKAAWQKLRNPLLSLSAKPLVMRLIIDDVVKMQIAGQNKIMRVVKIAQNGQIFFAEHNEANVDARDKDKNNPFKYISKTAGSLQKAGGIHMAISPIGDARPVRYGR

SEQ ID NO: 162 - protein, 1364 aa, Pediococcus acidilactici
MGDRKYNLGLDIGTSSIGFAAVDENNQPIRVKGKTAIGVRLFEEGKTAADRRGFRTTRRRLSRRRWRINLLNEIFDAHLAEVDPTFLARLKESNRSNLDPKKSFQGSLLFPERKDYQFYEEYPTIYHLRKALMEKDRKFDFREIYLAVHHIIKYRGNFLNGTPMRSFKVENIELDTLFDQLNQLYAEIVPDNELAFDLAQVADVKDVLSSTTIYKMDKKKQLVKMMLLPASNKALQSENKKIVTQFVNAILNYKFKLDVLLQVETDADWSLKLNDEGADDKLEEFTGDLDENRLEIIDLLQRLHNWFSLNEITKDGNSLSAAMVEKYENHHHHLGLLKKVIENHPDAKKAKALKETYTAYVGKTDDKTQNQDDFYKAVEKNLDDSPDAKEIKRLIQLDQFMPKQRTGQNGAIPHQLHQQELDQIIEKQSKYYPFLAEPNPNVKRRKDAPYKLDELIAFKIPYYVGPLVTPEEQAQNGENVFAWMKRKAAGPITPWNFDEKVDRMESANRFIRRMTTKDTYLFGEDVLPAESMIYQKFVVLNELNNLKINGRHLSLKDKQDVYNDLFKQQKTVSIKALQNYYVTKKKAATAPTVGGLADPKKFLSSLSTYIDFKNMFGERVNDPQFQEDLEQIVEWSTIFEDRGIFKAKLQALGWLSEKQIQQLVAKRYKGWGRLSKKLLTGLKNAEGYSILDEMWRSTGNFMQIQSRPEFAALIQQANEKQFEGNDPDNVWENIENILGDAYTSPQNKKAIRQVVKVVQDIEKAVGNPPEKIAIEFTREAAANPQRTQSRLRTLEKLYESAEEVVDAGLTAELAEFKENKHVLSDKYYLYFTQLGRDVYTGDTISLDKLNDYDVDHILPQSFIKDDSLDNRVLTIRAVNNGKSDNVPAKMFGKKMGSFWRYLLDNGMISKRKYNNLITDPDNISKYAQKGFINRQLVETSQVIKLTANILNGIYDKDTEIIEVPAKMNSQMRKMFDLVKVREVNDYHHAFDAYLTIFIGNYLYKCYPKLQPYFVYDNFKKFGNKEDIGHKRFNFLGKIEREKKVVAPETGEILWSNVAPNETIKQIKKVYDYKFMIVSREITTRRAELFNQTVYPKNYHGKLIPIKEDRPTDLYGGYSGNTDAYLAIVALEDKKKGKYFKVVGIPTRVAAKLEKLKQQDSQQYLQALHKVIAPQFTKSTKKGIKKTEFEIVLDKVHYRQLVQDGPVKMMLGSSTYKYNAKQLVLSEKALQVIADDRKFDETQKDDNLIAVYDEILSIVNQSFDLYDINGFRKKLNDNRDQFIDLPAETKYEGRKVVAHGKREMILEILKGLHANAAFGNLKPIGFSTAFGQLQVPNGIILSKNAILIHQSPSGLFERKIKLSDL

SEQ ID NO: 163 - protein, 1364 aa, Peptoniphilus duerdenii
MKNLKEYYIGLDIGTASVGWAVTDESYNIPKFNGKKMWGVRLFDDAKTAEERRTQRGSRRRLNRRKERINLLQDLFATEISKVDPNFFLRLDNSDLYREDKDEKLKSKYTLFNDKDFKDRDYHKKYPTIHHLIMDLIEDEGKKDIRLLYLACHYLLKNRGHFIFEGQKFDTKNSFDKSINDLKIHLRDEYNIDLEFNNEDLIEIITDTTLNKTNKKKELKNIVGDTKFLKAISAIMIGSSQKLVDLFEDGEFEETTVKSVDFSTTAFDDKYSEYEEALGDTISLLNILKSIYDSSILENLLKDADKSKDGNKYISKAFVKKFNKHGKDLKTLKRIIKKYLPSEYANIFRNKSINDNYVAYTKSNITSNKRTKASKFTKQEDFYKFIKKHLDTIKETKLNSSENEDLKLIDEMLTDIEFKTFIPKLKSSDNGVIPYQLKLMELKKILDNQSKYYDFLNESDEYGTVKDKVESIMEFRIPYYVGPLNPDSKYAWIKRENTKITPWNFKDIVDLDSSREEFIDRLIGRCTYLKEEKVLPKASLIYNEFMVLNELNNLKLNEFLITEEMKKAIFEELFKTKKKVTLKAVSNLLKKEFNLTGDILLSGTDGDFKQGLNSYIDFKNIIGDKVDRDDYRIKIEEIIKLIVLYEDDKTYLKKKIKSAYKNDFTDDEIKKIAALNYKDWGRLSKRFLTGIEGVDKTTGEKGSIIYFMREYNLNLMELMSGHYTFTEEVEKLNPVENRELCYEMVDELYLSPSVKRMLWQSLRVVDEIKRIIGKDPKKIFIEMARAKEAKNSRKESRKNKLLEFYKFGKKAFINEIGEERYNYLLNEINSEEESKFRWDNLYLYYTQLGRCMYSLEPIDLADLKSNNIYDQDHIYPKSKIYDDSLENRVLVKKNLNHEKGNQYPIPEKVLNKNAYGFWKILFDKGLIGQKKYTRLTRRTPFEERELAEFIERQIVETRQATKETANLLKNICQDSEIVYSKAENASRFRQEFDIIKCRTVNDLHHMHDAYLNIVVGNVYNTKFTKNPLNFIKDKDNVRSYNLENMFKYDVVRGSYTAWIADDSEGNVKAATIKKVKRELEGKNYRFTRMSYIGTGGLYDQNLMRKGKGQIPQKENTNKSNIEKYGGYNKASSAYFALIESDGKAGRERTLETIPIMVYNQEKYGNTEAVDKYLKDNLELQDPKILKDKIKINSLIKLDGFLYNIKGKTGDSLSIAGSVQLIVNKEEQKLIKKMDKFLVKKKDNKDIKVTSFDNIKEEELIKLYKTLSDKLNNGIYSNKRNNQAKNISEALDKFKEISIEEKIDVLNQIILLFQSYNNGCNLKSIGLSAKTGVVFIPKKLNYKECKLINQSITGLFENEVDLLNL

SEQ ID NO: 164 - protein, 1089 aa, Corynebacterium matruchotii
MNSANVNYRVGIDVGSYSLGMAAIAIDDDGKPTEILSAISLIHDSGVDPDSAKSAATRLATSGIARRTRRLYRRKRKRLAKLDKFISSQGWPLKEFEKYEDPFYPWRVRAELATTAITDQQELGEKLSIALRHIARHRGWRNPYSKVTALYTVTEPSDAFLAMQEECAKQLGRTIPETITVGQLVTGMNLGKTRLRGENSLLAARPRQSDNANEIHTIAKVQGLSNELVRQIIDHVFAAESPKGSAAEQVGKDPLQPTKKRALKASDAFQQYRIAALIGNLRIRGGKGNRRLTTEETRLVFDYLRSLPAKQEPTWQLVAEQLKIDRGNLVGTAIMTDDGERAGAKPPVHDTNRIMENTKIKPLATWWKSADADARAAMVKALSNAEVDDFDSQAGAQVQEFFFGISDEDQEKLDGLHLPIGRAAYSEDTLDRLTKRMIGEGMDLYEARQAEFKISNDWAPPAPEIGERVGNPAVDRVLKATARWLNAAERQWGAPKSVNIEHVRAAFMSESSARELDRDNQQRAKRNVKVVAEMQEKLGIEGRPSRADVWRFQSIQRQNGKCAYCGAEISFKNSEMDHIIPQAGEGSTNTRDNLVAVCRECNSSKSNIAFAVWAENTSRPGVSVQKAIERTHHWVTDSGLRKPEFDKFRKQVCDRLRRKATDEPIDARSLESVAWMANELRSRIAQKFKDGDTKVRVYKGALTAEARRASGISGKLEFVDGKGKSRLDRRHHAVDAAVVAFTSNYVAETLALRSNMKFDQELRRKAPQWREFTGSDHVHQVEWTKWKYRMQALAELLNNALVQDRIVVMHNLRLRLGNGAAHEDTIGKLTRLKVGDAISTTDIDRASSEALWCALTRDPDYDPKTGLPENPNRTIRIHGTHLTASDEITVFPVAAASIPIRDGFAKLGSNYHHVRLFRVPSGKKYKYCLMQVYTVDLLKFRKEDLFTVELKPQTISVRTCEALLRKALANGTAEYLGWLVSDDELLIDTSSFDTPGIVKLREEYGPVNRWRLAGLTSVTRLNLRPLYLSKEGLKPNVNPEIKKIIDNRSWIITVNKLFSSGHVKIIRRDALGRPRLHSAAHLPICWEVK

SEQ ID NO: 165 - protein, 1134 aa, Streptococcus mitis
MNGLVLGLDIGIASEGVGILEKNSGKIIHANSRLFPAATADNNVERRKNRQARRLNRRKKHRGVRFQDLFEDYGLLTDFSKVSINLNPYRLRVDGLNQQLTNEELFIALKNIVKRRGISYLDDASEDGGAVSSDYGKAVEENRKLLAEQTPGQIQLERFEKYGQVRGDFTVVENGEKLRLINVFSTSAYKKEAERILRKQQEFNNQITDEFIEDYLKILTGKRKYYHGPGNEKSRTDYGRFRTDGTTLDNIFGILIGKCTFYPEEYRASKASYTAQEFNLLNDLNNLTVPTETKKLSEEQKKVIVEYAKEAKTLGASTLLKYIAKMIDASVDQIRGYRVDVNNKPEMHTFEVYRKMQSLETISVGELSRNVLDELAHILTLNTEREGMEEAINTKLKDSFSQDQVLELVQFRKNNSSLFSKGWHNFSLKLMMELIPELYETSEEQMTILTRLGKQKSKETSKRTKYIDEKELTEEIYNPVVAKSVRQAIKIINEATKKHGIFDNIVIEMARENNEEDAKKDYIKRQKANQDEKNAAMEKAAFQYNGKKELPDNIFHGHKELATKIRLWHQQGEKCLYTGKTIPISDLIYNQYKYEIDHILPLSLSFDDSLSNKVLALATANQEKGQRTPFQALDSMDDAWSYREFKSYVKDLKSLSNKKKDYLLTEEDISKIEVKQKFIERNLVDTRYSSRVVLNALQDFYKSHQFDTTISVVRGQFTSQLRRKWGLEKSRETYHHHAVDALIIAASSQLRLWKKQNNPLITYKEGQFVDSQTGEIISLTDDEYKELVFKAPYDHFVDTLSSKTFEDSILFSYQVDSKFNRKISDATIYATRKAKLDKEKKEYTYTLGKIKDIYSLGTKTPSKTGFYKFLDLYNKDKSQFLMFQKDRKTWDEVIEKIMEQYRPFKEYDKTGKLVDFNPFEKYRQENEPIRKYSKKGNGPEIKSLKYYDILLGKHKNITPEGSRNTVALLSLNPWRTDVYYNMETKKYEFLGLKYADLPFEEGGAYGISTETYNELREKEGIGKNSEFKFTLYKNDLILIKDTETNCQQIFRFWSRTGKDNPKSFEKHKIELKPYEKARFEKGEELEVLGKVPPSSNQLQKNMQIENLSIYKVKTDVLGNKHFIKKEGDKPKLKF

SEQ ID NO: 166 - protein, 1373 aa, Streptococcus bovis
MTKKNYSIGLDIGTNSVGWAVITDDYKVPAKKMKVLGNTDKKYIKKNLLGALLFDSGETAEATRLKRTARRRYTRRKNRLRYLQEIFAEEMTKVDESFFQRLDESFLRWDDDNKKLGRYPIFGNKADVVKYHQEFPTIYHLRKHLADSSEKADLRLVYLALAHMIKFRGHFLIEGELNAENTDVQKIFADFVGVYDRTFDDSHLSEITVDAASILTEKISKSRRLENLIKYYPTEKKNTLFGNLIALALGLQPNFKMNFKLSEDAKLQFSKDSYEEDLGELLGKIGDDYADLFTSAKNLYDAILLSGILIVDDNSTKAPLSASMIKRYVEHQEDLEKLKEFIKANKSELYHDIFKDKNKNGYAGYIENGVKQDEFYKYLKNTLSKIAGSDYFLDKIEREDFLRKQRTFDNGSIPHQIHLQEMHAILRRQGDYYPFLKENQDRIEKILTFRIPYYVGPLARKDSRFSWAEYHSDEKITPWNFDKVIDKEKSAEKFITRMTLNDLYLPEEKVLPKHSHVYETYAVYNELTKIKYVNEQGKDSFFDSNMKQEIFDHVFKENRKVTKEKLLNYLNKEFPEYRIKDLIGLDKENKSFNASLGTYHDLKKILDKAFLDDKVNEEVIEDIIKTLTLFEDKDMIHERLQKYSDIFTADQLKKLERRHYTGWGRLSYKLINGIRNKENNKTILDYLIDDGSANRNFMQLINDDTLPFKQIIQKSQVVGDVDDIEAVVHDLPGSPAIKKGILQSVKIVDELVKVMGDNPDNIVIEMARENQTTNRGRSQSQQRLKKLQNSLKELGSNILNEEKPSYIEDKVENSHLQNDQLFLYYIQNGKDMYTGDELDIDHLSDYDIDHIIPQAFIKDDSIDNRVLTSSAKNRGKSDDVPSLDIVRARKAEWVRLYKSGLISKRKFDNLTKAERGGLTEADKAGFIKRQLVETRQITKHVAQILDARFNTESDENDKVIRDVKVITLKSNLVSQFRKDFEFYKVREINDYHHAHDAYLNAVVGTALLKKYPKLASEFVYGEYKKYDIRKFITNSSDKATAKYFFYSNLMNFFKRVIRYSNGKVIVRPVVEYSKDTEDIAWDKKSNFRTICKVLSYPQVNIVKKVETQTGGFSKESILPKGDSDKLIPRKTKKAYWDTKKYGGFDSPTVAYSVFVVADVEKGKAKKLKTVKELVGISIMERSFFEENPVEFLENKGYHNIREDKLIKLPKYSLFEFEGGKRRLLASASELQKGNEMVIPGHLVKLLYHAQRINSFNSTKYLDYVSAHKKEFEKVLSCVEDFANLYVDVEKNLSKIRAVADSMDNFSIEEISNSFINLLTLTALGAPADFNFLGEKIPRKRYTSTKECLNATLIHQSITGLYETRIDLSKIGEE

SEQ ID NO: 167 - protein, 1099 aa, Corynebacterium accolens
MSLLYRVGIDVGTYSLGCTAIEVDDNDQPVSILSSVSLIHDSGLDPDQQKRAVTRLASSGVARRTRRLYRRRRRRMVKLENFLTAQGWETLPFERYSDPYLPWHARVALVNGYISDDTQRGQYLSIAFRHIANHRGWRNPYWKVSSLYSPDKPSDAFEQIRKELEASTGRQIPETATVGQLISFAQFGKDRLRGGGKQKDKKKPQEQVNQAVISARLHQIDHAREINEICRVQKIDDTLRKQILDLVFAAESPKGAQKGRVGKDPLQPKLFRALKASDAFQQYRIAALTGNLRIYRNGVTVPLDRDEKLIVFNYLVNLPKKEEPSWLKIAEILNIDRGQLRGTATMTDDGERAGATPPVHDTNRTILDSKVKPLAHWWENASDDERAAMLKSLSNSEVEDFDSPAGAQVQAFFADLDETEQEKLDSLHLPMGRAAYSEDTLMRLTNRMLDENLDLYEARLAEFGIPKDWAPPAPRIGEPVGNPAVDRVLKGVARWLEAAADEWGAPKSVVIEHVRDGFVSKSKAIEIDRANNNRHKRNRELFQKMQENLGIEGKVRSSDLWRYQSVQRQNCQCAYCGSPITYTTCEMDHIVPRAGEGSTNTRDNLVATCHRCNLAKKNIPFAVWAEKSTIPGVSVKEALDRTRHWSEDSGMSKKDFQKFRKNVCERLNRTVVDEPLDARSMESVAWMANELRGRVAQRFQEENTTVNVYRGALTAEARRAAGITDKLRFIDGTGKSRLDRRHHAVDAAVVAFIHNYVAETLAIRSNKKREAQLLQGTSQWKEFTGSDDKHRAVWNAWIPKMQKLAVLLQIALDEDRIVVTSNLRLRLGNGRAHEDTISELKTIRVGDAISVTDIDRASSEALWCALTREPDFDEKDGLPENPNRRIRVHGTWYDAEDEIEVFPVGAGAIKVRGGYAKLSRFHHARVYKIPGKKAPIYCMLRVYNTDLVQHRHEDLFSVELKPQTMSVRQAEPKLRKALAENTAEYLGWLVTDDELIIDTSTFRTGLIEEMQSEFGLVRRWRLDGFDSPSLLTLRPLHMSAEGLPDDCALGSRKIIDTKGWRVSINKVFNAGNTTVVRRDALGRARLTSNAHLPISWKEE

SEQ ID NO: 168 - protein, 1054 aa, Actinobacillus pleuropneumoniae
MKLTPLNYILGLDLGIASVGWAVVEIDEQENPLGLIDVGVRTFDRAEVAKTGESLALARRLARSSRRLVKRRADRIKKVKRLLKSENILLSADEQLPNDVWQLRVKGLDQKLERQEWAAVLLHLLKHRGYLSQRKNESKSENKELGALRSGVAANHQILQSAEYRTPAEIAVKKFHVEEGHIRNQRGAYTHTFSRLDLLAEIELLFTRQTELGNPHTSAKLLENLTALLMWQKPALAGEAILKMLGKCTFEPTEYKAAKNSYSAERFVWLTKLNNLRILEQGAERALTDNERFALLDQPYEKAKFTYAQARTMLALPDEAIFKGVRYQGEDKKAVETKTILMEMKAYHQIRKALENADLKAEWNELKNNSELLDDIGTAFSLHKTDEDICRYLDGKLSESILNALLENLNFDKFIQLSLKALQQILPLMLQGQRYDEAVSAIYGDHYGKKSAEINRLLPTIPADEIRNPVVLRTLTQARKVINAVVRLYGSPARIHIETGREVGKSYQDRKKLEKQQEDNRKHRESAVQKFKEYFPNFVGEPKGKDILKMRLYELQQAKCLYSGKSLELHRLLEKGYVEVDHALPFSRTWDDSFNNKVLVLANENQNKGNLTPYEWLDGKNNSEPWQNFVARVQTSGFSHTKKQRILSHKLDEKGFIERNLNDTRYVVRFLCNFIADNMLLTGKGKRKVFASNGQITALLRGRWGLQKVRDDNDRHHALDAVVVACSTVAMQQKITRFVRYEEGNVFSGERIDRETGEIIPLHFPSPWAFFRENVEIRIFSENPKLELENRLPDYPQYNHEFVQPLFVSRMPTRKMTGQGHMETVKSAKRLDEGLSVLKVPLTQLKLNDLERMVNREREMALYESLKVRLEQFDNDPAKAFAEPFYKKGGALVKAVRVEQTQKSGVLVRDGNGVADNASMVRVDVFTKAGKYFLVPIYTWQVAKGILPNKAVTANVDEIDWLEMDESYQFIFTMYPNDLVKVKLKKEEFFGYYGGLDRATGAIVIKEHDLEKSKGRQGIYRIGVKLALSFEKYQVDELGKNIRPCRPTKRQHVR

SEQ ID NO: 169 - protein, 1369 aa, Lactobacillus iners
MNNNYYLGLDLGTNSVGWAVTDDHYNIIKFHGKHMWGMRLFEEAETAKDRRLHRQARRRRQRLVERINLLEELFDKEISKVDQGFFARKKESDLHFEDKTTKSEYALFNDKSYTDRDYYKQYPTIFHLIMDLIENDKKRDIRLVYLACHYLIKHRGHFIFDGKNFTVDNSFENLLDKLITYLKDNDDITLSFPKDQLINIFKNSNLNSTEKSDQLKPFFGRTNLEKGIIKLLSGGKQDLSNMFRDETLKNSNYKNLKFSDNRFDDERDGYAADLGDRIDLLILLKQIYDASILESMMSQARVSIDGHKYISSAKVCAYEKHKSDLKRLKSLIKKYLPSEYNNIFRKITEKDNYVAYSKSNITNNKREKALKYVKYVDFTKYLTKKLKTIKTQDAEDDQEIFEIKGELEKQSFLPKQRTLDNSIIPYQLHLMELKKILDNQSKYYDFLLAKDDQEGITVKDKIISLLTFRLPYYIGPVNPAVHGKFAWVKRLANGKVTPWNYKEKIDIDASHEEFIKTKLSKCSFLIGCDVLPKNSLLYQKYMVLSELNTIKFNGVNISEKLKDDIYQNLFKNIQKVTKKRLQNYIKEHENIIGDVIVTGIDNAFKQGLVSYLKFKKIIGDKVDDDRYQKVLEKIIRDITLYDECAGKKIKKEYKDSDLFTEDELNKIVKLTFNDWGRLSAELLDQLEGEDTVSGETGKIIEFMQKHNYNLMQLMSKKFTFKSKIDEINKSYYQHDKFNYKSMIDSLYVSPATKRILWQSLKVVHEISKIMKHDPEKIFIEMARSKEDHPKRKLSRKADLKQVYKDSKKQIISIIGKDKYQDLSNELDNKDDRDLRWDNLYLYYTQLGRSMYSLKPIDISELMNKNLYDQDHIFPKSKKYDDSIENRVLVEKELNVKKSDIYPISDANIIPQKIKGQVESFWKMLYDHKLIGDKKYARLIRSKAFTDDELAGFIARQLVETRQATKETADLLKRLCPKSRIVYAKAQNASIFRQKFDIPKSRTINDLHHAQDAYLNIVVGNIFDTKFTQDPRNFIKNTKDSRNYNLEKIYDYNVERNNYVAWIAPDGETNGTIANVKCNLSTKDFRVTRPSFYKKGALFNQNLSRKGSNLAPIKEHSPKSNPLKYGGYSGKNNSFFVVVAGKDNKGKDIVKLIPVNTLIYNKMLHCDYKAKQELLTSYVANNFAINNFRIVKDDIKMYSLVKIDGAYYYLVGGTDERIEVKNAMQLLLSKDSIKAVKILEKESKDQFANIKNYKDIDIKLGRTFNEVVSKYTNSVFGKSMLISDKYRKDIFKSVEKSILEFNHLDTIGKADNLLKFVTLMRPSGSAHSLKMVGLIERIRKSNVISNFNEFKLINQSVTGLFENEEDLLKL

SEQ ID NO: 170 - protein, 1420 aa, Bifidobacterium bifidum
MSRKNYVDDYAISLDIGNASVGWSAFTPNYRLVRAKGHELIGVRLFDPADTAESRRMARTTRRRYSRRRWRLRLLDALFDQALSEIDPSFLARRKYSWVHPDDENNADCWYGSVLFDSNEQDKRFYEKYPTIYHLRKALMEDDSQHDIREIYLAIHHMVKYRGNFLVEGTLESSNAFKEDELLKLLGRITRYEMSEGEQNSDIEQDDENKLVAPANGQLADALCATRGSRSMRVDNALEALSAVNDLSREQRAIVKAIFAGLEGNKLDLAKIFVSKEFSSENKKILGIYFNKSDYEEKCVQIVDSGLLDDEEREFLDRMQGQYNAIALKQLLGRSTSVSDSKCASYDAHRANWNLIKLQLRTKENEKDINENYGILVGWKIDSGQRKSVRGESAYENMRKKANVFFKKMIETSDLSETDKNRLIHDIEEDKLFPIQRDSDNGVIPHQLHQNELKQIIKKQGKYYPFLLDAFEKDGKQINKIEGLLTFRVPYFVGPLVVPEDLQKSDNSENHWMVRKKKGEITPWNFDEMVDKDASGRKFIERLVGTDSYLLGEPTLPKNSLLYQEYEVLNELNNVRLSVRTGNHWNDKRRMRLGREEKTLLCQRLFMKGQTVTKRTAENLLRKEYGRTYELSGLSDESKFTSSLSTYGKMCRIFGEKYVNEHRDLMEKIVELQTVFEDKETLLHQLRQLEGISEADCALLVNTHYTGWGRLSRKLLTTKAGECKISDDFAPRKHSIIEIMRAEDRNLMEIITDKQLGFSDWIEQENLGAENGSSLMEVVDDLRVSPKVKRGIIQSIRLIDDISKAVGKRPSRIFLELADDIQPSGRTISRKSRLQDLYRNANLGKEFKGIADELNACSDKDLQDDRLFLYYTQLGKDMYTGEELDLDRLSSAYDIDHIIPQAVTQNDSIDNRVLVARAENARKTDSFTYMPQIADRMRNFWQILLDNGLISRVKFERLTRQNEFSEREKERFVQRSLVETRQIMKNVATLMRQRYGNSAAVIGLNAELTKEMHRYLGFSHKNRDINDYHHAQDALCVGIAGQFAANRGFFADGEVSDGAQNSYNQYLRDYLRGYREKLSAEDRKQGRAFGFIVGSMRSQDEQKRVNPRTGEVVWSEEDKDYLRKVMNYRKMLVTQKVGDDFGALYDETRYAATDPKGIKGIPFDGAKQDTSLYGGFSSAKPAYAVLIESKGKTRLVNVTMQEYSLLGDRPSDDELRKVLAKKKSEYAKANILLRHVPKMQLIRYGGGLMVIKSAGELNNAQQLWLPYEEYCYFDDLSQGKGSLEKDDLKKLLDSILGSVQCLYPWHRFTEEELADLHVAFDKLPEDEKKNVITGIVSALHADAKTANLSIVGMTGSWRRMNNKSGYTFSDEDEFIFQSPSGLFEKRVTVGELKRKAKKEVNSKYRTNEKRLPTLSGASQP

SEQ ID NO: 171 - protein, 1092 aa, Ilyobacter polytropus
MKYSIGLDIGIASVGWSVINKDKERIEDMGVRIFQKAENPKDGSSLASSRREKRGSRRRNRRKKHRLDRIKNILCESGLVKKNEIEKIYKNAYLKSPWELRAKSLEAKISNKEIAQILLHIAKRRGFKSFRKTDRNADDTGKLLSGIQENKKIMEEKGYLTIGDMVAKDPKFNTHVRNKAGSYLFSFSRKLLEDEVRKIQAKQKELGNTHFTDDVLEKYIEVFNSQRNFDEGPSKPSPYYSEIGQIAKMIGNCTFESSEKRTAKNTWSGERFVFLQKLNNFRIVGLSGKRPLTEEERDIVEKEVYLKKEVRYEKLRKILYLKEEERFGDLNYSKDEKQDKKTEKTKFISLIGNYTIKKLNLSEKLKSEIEEDKSKLDKIIEILTFNKSDKTIESNLKKLELSREDIEILLSEEFSGTLNLSLKAIKKILPYLEKGLSYNEACEKADYDYKNNGIKFKRGELLPVVDKDLIANPVVLRAISQTRKVVNAIIRKYGTPHTIHVEVARDLAKSYDDRQTIIKENKKRELENEKTKKFISEEFGIKNVKGKLLLKYRLYQEQEGRCAYSRKELSLSEVILDESMTDIDHIIPYSRSMDDSYSNKVLVLSGENRKKSNLLPKEYFDRQGRDWDTFVLNVKAMKIHPRKKSNLLKEKFTREDNKDWKSRALNDTRYISRFVANYLENALEYRDDSPKKRVFMIPGQLTAQLRARWRLNKVRENGDLHHALDAAVVAVTDQKAINNISNISRYKELKNCKDVIPSIEYHADEETGEVYFEEVKDTRFPMPWSGFDLELQKRLESENPREEFYNLLSDKRYLGWFNYEEGFIEKLRPVFVSRMPNRGVKGQAHQETIRSSKKISNQIAVSKKPLNSIKLKDLEKMQGRDTDRKLYEALKNRLEEYDDKPEKAFAEPFYKPTNSGKRGPLVRGIKVEEKQNVGVYVNGGQASNGSMVRIDVFRKNGKFYTVPIYVHQTLLKELPNRAINGKPYKDWDLIDGSFEFLYSFYPNDLIEIEFGKSKSIKNDNKLTKTEIPEVNLSEVLGYYRGMDTSTGAATIDTQDGKIQMRIGIKTVKNIKKYQVDVLGNVYKVKREKRQTF

SEQ ID NO: 172 - protein, 994 aa, Streptococcus downei
MENQRGKRQRITHQEPYSIGLDIGTASVGSAVINNDLTVPQKRFKVRDINGNVIKTIKKNMSSVLIFDEANPAKGARTKRTSRRRYTRRNFRLLELKKLFEKEIEKIDPNFFHRIKEDSFFNWNDKEFDKHPLFGNLKEEKKFHNNYPTVFHLRNEIGKNSSKKFDLRLVYLALAHIIKYRGHFLDETFDPDASVSVEKRLNDFIVEYNELFDKDLRSEAKFSEILMSDSSNSVKIESTLSLYPSEKNTIFQVFLKLIVGNQGDFNKFFKDELESSSHSGKLVFSSDEVEDEKEELISIIGEDYLDIINLCQSLYSTVALAKIISTDTGESNTPLSASMVKRYNEHKGDLANLKGIVKHFIPEKYEEVFGEHSKTGYTAYIRNPNKMPEKKFYDYLYHEGEKGKISGILSDSRIYELPAVQKFILKIEQKSFLKKQRTKENGLIPYQLHLKELKIIIENQSEYYPFLHEIEEKLEKLLTFRIPYFVGPLAQTKYINPRFNWLVRKSEDHIKPWNFSEIVDEEKSATKFIEKLISNDQFLFGEKVLPKRSIIYQQFLIFNELTKVSYQIKDGPSRNFDSETKEEIFNSLFKKNKLGCVTVVDLKNYIKNDQCLSEKEDIQIEGIKKKFNSSYSTYADLSEISGLKELLDDDTQLDLVEEIIRILTVFEDKKMRTKQLEKLNLPANVDIEKLCKKHYKGWANVSRQLIDGIADRSRGFKKTILDYLKDDDIPNNDAFSTKVQKSLNRNFAQLITDKSLDFARKLDESYKIDVKKDYPSLVEDIPGSPAIRRAILQSLYTVDEIIGVMGRMPKNIVIEMARTNEVSDSPKTRKERIKKLIKETENDADALNFGISKVSEIFDEVKKDENLFKELEVYLYFLQEGKDMYGTETREGHRQPKEINFYDVKNSTGKYHIDHIIPQSLYSGNPLDNIVLTESTNNKIKDKDVPDEATVYEMKNFWLYLMKKGAISKKKFSFLTKIEQGGLSNEDKFGFINR

SEQ ID NO: 173 - protein, 1052 aa, Aminomonas paucivorans
MIGEHVRGGCLFDDHWTPNWGAFRLPNTVRTFTKAENPKDGSSLAEPRRQARGLRRRLRRKTQRLEDLRRLLAKEGVLSLSDLETLFRETPAKDPYQLRAEGLDRPLSFPEWVRVLYHITKHRGFQSNRRNPVEDGQERSRQEEEGKLLSGVGENERLLREGGYRTAGEMLARDPKFQDHRRNRAGDYSHTLSRSLLLEEARRLFQSQRTLGNPHASSNLEEAFLHLVAFQNPFASGEDIRNKAGHCSLEPDQIRAPRRSASAETFMLLQKTGNLRLIHRRTGEERPLTDKEREQIHLLAWKQEKVTHKTLRRHLEIPEEWLFTGLPYHRSGDKAEEKLFVHLAGIHEIRKALDKGPDPAVWDTLRSRRDLLDSIADTLTFYKNEDEILPRLESLGLSPENARALAPLSFSGTAHLSLSALGKLLPHLEEGKSYTQARADAGYAAPPPDRHPKLPPLEEADWRNPVVFRALTQTRKVVNALVRRYGPPWCIHLETARELSQPAKVRRRIETEQQANEKKKQQAEREFLDIVGTAPGPGDLLKMRLWREQGGFCPYCEEYLNPTRLAEPGYAEMDHILPYSRSLDNGWHNRVLVHGKDNRDKGNRTPFEAFGGDTARWDRLVAWVQASHLSAPKKRNLLREDFGEEAERELKDRNLTDTRFITKTAATLLRDRLTFHPEAPKDPVMTLNGRLTAFLRKQWGLHKNRKNGDLHHALDAAVLAVASRSFVYRLSSHNAAWGELPRGREAENGFSLPYPAFRSEVLARLCPTREEILLRLDQGGVGYDEAFRNGLRPVFVSRAPSRRLRGKAHMETLRSPKWKDHPEGPRTASRIPLKDLNLEKLERMVGKDRDRKLYEALRERLAAFGGNGKKAFVAPFRKPCRSGEGPLVRSLRIFDSGYSGVELRDGGEVYAVADHESMVRVDVYAKKNRFYLVPVYVADVARGIVKNRAIVAHKSEEEWDLVDGSFDFRFSLFPGDLVEIEKKDGAYLGYYKSCHRGDGRLLLDRHDRMPRESDCGTFYVSTRKDVLSMSKYQVDPLGEIRLVGSEKPPFVL

SEQ ID NO: 174 - protein, 1023 aa, Helicobacter cinaedi
MKIYSFDIGVASIGWAFIENEVLQDCGIRIFTKAENPKNGASLALPRREARGVRKRLARRRGRLNTIKQLLCKEFGLQLEDYLSNDGELPKAYTASKANPLKSPYELRTLALSQKLDSKDLVRVILHIAKHRGYGNKHAKDSKDTESGKVKKAIEFNRKTLAEKGYRSVGEYLYREFFQQSRISQNNGATEFINVRNKAGNYEHCVAQDMLKEELESILNAQRQFGFSLKQDFENKLLTKIFEQRPLKSFADKVGNCCFIAGEKRAPKDSPSAIEFIALSRTINTLINLSKESGEIYNRAIILQIVESTLKKGEISYKELREIIRLDERLRFKDPRLDYSREIKEAEKVKFLEFKQLKGFKKALGESFTTLAISQLDEIAEHIALIKDRVKLNEKLESYALTKEQREALSNLSFSAHINLSLQALKQILPFMRGDNGEQCLDYDESVEKAGLKALSKDTLKGQMLPPLNEFEPYLSNPVVARALAEYRKVLNVLLKQYGSPHKIHIEYAREAKLSSTERQKYEKEQKDNYAANQAAHKKCQELGLEPSSTNLLKLKLWQEQGGLCLYSGAKITISYLQDPTALQVDHIYPYSRSFDDSYMNKCLVLTKANQEKGNRTPFEAFGTDSAKWGVITTLAQKLPHKKRRRILNTAFNDKEAGFKLRNLNDTSYIARLVADYTETYLEFLPLVESENTTLSKGQKGSKKHIAIVNGVLTSTMRYYLGFASKDRDNHLHHALDAVIIGFMNDSVIKAFSDFKKTQETSKAAYYAHTLSKQEYKKQRAFIQLPSGENFRVSVLEKVESVFVSKPPRKRVRGALHEATFYSPNDPKLLKNYGGTKGVERALALGKMRKVGAKIVSNGAMVRVDIFRHKSSGKFYGVPVYTMDFALGILPNKAVVVGKDQNGVIKDWLEMDSSYEFIFSLYKDDVILVQKKEMQRPELCYFVSFDTSGASIKVAKHDNNFSTLTENQKLLFSNATKEEVVGKSIGIQNLKVFEKWQVSVLGEVKRTQSYPRENISLASKAKK

SEQ ID NO: 175 - protein, 874 aa, Listeria seeligeri
LANGQSEFSWLTRKADGEIRPWNIEEKVDFGKSAIDFIEKMTNKDTYLPKENVLPKHSMCYQKYMVYNELTKIRYTDDQGKTHYFSGQEKQQIFNDLFKQKRKVKKKDLELFLYNMNHVESPTVEGVEDAFNSSFTTYHDLQKVGVPQEILDDPLNTEMLEEIIKILTVFEDKRMINERLQEFSNVLDEAVLKKLERRHYTGWGRLSAKLLIGIRDKESHLTILDYLMNDDKHNRNLMQLINDSNLSFKSIIEKEQVSTADKDIQSIVADLAGSPAIKKGILQSLKIVDELVGIMGYPPQTIVVEMARENQTTGKGKNNSKPRFTSLEKAIKELGSQILKEHPTDNQGLKNDRLYLYYLQNGKDMYTGQELDIHNLSNYDIDHVVPQSFITDNSIDNRVLASSAANREKGDNVPSLEVVRKRKVYWEKLYQAKLMSKRKFDYLTKAERGGLTEADKARFIHRQLVETRQITKNVANILHQRFNCKKDESGNVIEQVRIVTLKAALVSQFRKQFQLYKVREVNDYHHAHDAYLNCVVANTLLKVYPQLEPEFVYGDYHQFDWFKANKATAKKQFYTNIMLFFAKKDRIIDENGEILWDKKYLDTIKKVLNYRQMNIVKKTEIQKGEFSNATANPKGNSSKLIPRKADWDPIKYGGFDGSNMAYAIVIEHEKRKKKTVIKKELIQINIMERTAFEKDQKEFLEGKGYRNPKVITKIPKYTLYECENGRRRMLGSANEAQKGNQMVLPNHLMTLLYHAKNCEASDGKSLAYIESHREMFAELLDSISEFASRYTLADANLEKINTIFEQNKSGDVKVIAQSFVNLLEFNAMGAPASFKYFETNIERKRYNNLKELLNATIIYQSITGLYEARKRLDD

SEQ ID NO: 176 - protein, 1082 aa, Neisseria lactamica
MAAFKPNPMNYILGLDIGIASVGWAMVEIDKEENPIRLIDLGVRVFERAEVPKTGDSLAMARRLARSVRRLTRRRAHRLLRARRLLKREGVLQDADFDENGLVKSLPNTPWQLRAAALDRKLTCLEWSAVLLHLIKHRGYLSQRKNEGETADKELGALLKGVADNAHALQTGDFRTPAELALNKFEKESGHIRNQRGDYSHTFSRKDLQAELNLLFEKQKEFSNPHVSDSLKEGIETLLMAQRPALSGDAVQKMLGHCTFEPAEPKAAKNTYTAERFIWLTKLNNLRILEQGSERPLTDTERATLMDEPYRKSKLTYAQARKLLGLEDTAFFKGLRYGKDNAEAPTLMEMKAYHAISRALEKEGLKDKKSPLNLSTELQDEIGTAFSLFKTDKDITGRLKDRVQPEILEALLKHISFDKFVQISLKALRRIVPLMEQGKRYDEACAEIYGDHYCKKNAEEKIYLPPIPADEIRNPVVLRALSQARKVINCVVRRYGSPARIHIETAREVGKSFKDRKEIEKRQEENRKDREKAAAKFREYFPNFVGEPKSKDILKLRLYEQQHGKCLYSGKEINLVRLNEKGYVEIDHALPFSRTWDDSFNNKVLVLGSENQNKGNQTPYEYFNGKDNSREWQEFKARVETSRFPRSKKQRILLQKFDEEGFKERNLNDTRYVNRFLCQFVADHILLTGKGKRRVFASNGQITNLLRGFWGLRKVRAENDRHHALDAVVVACSTVAMQQKITRFVRYKEMNAFDGKTIDKETGEVLHQKAHFPQPWEFFAQEVMIRVFGKPDGKPEFEEADTPEKLRTLLAEKLSSRPEAVHEYVTPLFVSRAPNRKMSGQGHMETVKSAKRLDEGISVLRVPLTQLKLKGLEKMVNREREPKLYDALKAQLETHKDNPAKAFAEPFYKYDKAGNRTQQVKAVRIEQVQKTGVWVRNHNGIADNATMVRVDVFEKGGKYYLVPIYSWQVAKGILPDRAVVAFKDEEDWTVMDDSFEFRFVLYANDLIKLTAKKNEFLGYFVSLNRATGAIDIRTHDTDSTKGKNGIFQSVGVKTALSFQKNQIDELGKEIRPCRLKKRPPVR

SEQ ID NO: 177 - protein, 1326 aa, Streptococcus pseudoporcinus
MLGTVLFDSGETAQARRLKRTNRRRYTRRRYRLCQLQNIFATEMVKVDDTFFQRLSESFFYYQDKAFDKHPIFGNSKEERAYHKTYPTIYHLRKDLADRDQKADLRLIYLALSHIIKFRGHFLIEGKLNSENTDVQKLFIALVTVYNLLFEEEPIAGETCDAKALLTAKTSKSKRLESLISEFPGQKKNGLFGNLLALALGLRPNFKSNFGLSEDAKLQITKDTYEEELDNLLAEIGDHYADLFLAAKNLSDAILLSDILTLSDENTRAPLSASMIKRYEEHQEDLALLKKLVKEQMPEKYWEIFSNAKKNGYAGYIEGKVSQEDFYRYIKPILSRLKGGDEFLAKIDRDDFLRKQRTFDNGSIPHQIHLKELHAILRRQEKYYPFLAEQKEKIEQLLCFRIPYYVGPLAKGGNSSFAWLKRRSDEPITPWNFKDVVDEEASAQAFIEGMTNYDTYLPEEKVLPKHSPLYEMFTVYNELTKVKYIAENMTKPLYLSAEQKEAIIDHLFKQTRKVTVKDLKEKYFSQIEGLENVDVTGVEGAFNASLGTYNDLLKIIKDKAFLDDEANAEILEEIVLILTLFQDEKLIEKRLAKYANLFEKSVLKKLRKRHYRGWGRLSRQLIDGMKDKASGKTILDFLKADDFANRNFIQLINDSSLDFEKLIDDAQKKAIKRESLTEAVANLAGSPAIKKGILQSLKVVDEIVKVMGHNPDNIVIEMSRENQTTAQGLKNARQRLKKIKEVHKKTGSRILEDNSERITNLTLQDNRLYLYLLQDGKDMYTGQDLDINNLSQYDIDHIIPQSFIKDNSIDNLVLTTQKANRGKSDNVPSIEVVRDMKDRVWRRQLANGAISRQKFDHLTKAERGGLADSDKARFLRRQLVETRQITKHVAQLLDSRFNSKSNQNKKLARNVKIITLKSKIVSDFRKDFGLYKLREVNNYHHAHDAYLNAVVGTALLKKYPKLEAEFVYGDYKHFDLVKLISKSDPSLGKATAKVFFYSNIMNFFKEELSLADGTLMKRPVIETNTETGEVVWDKVKDFKTIRKVLSYPQVNIVKKTEIQSGAFSKESVLSKGNSDKLIERKKGWDPKKYGGFDSPNTAYSIFVVAKVAKRKAQKLKTVKEIVGITIMEQAEYEKDNIAFLEKKGYQDIQEKLLIKLPKYSLFELENGRRRLLASANEFQKGNELALSGKYMKFLYLASRYDKLSSKIESEQQKKLFVEQHLHYFDEILDIVVKHATCYIKAENNLKKIISLYKKKEAYSINEQALNMLNLFIFTSLGAPSTFVFFDETIDRKRYTTSSDVLNGILIQQSITGLYETRIDLSRFGGD

SEQ ID NO: 178 - protein, 1150 aa, Enterococcus faecalis
MYSIGLDLGISSVGWSVIDERTGNVIDLGVRLFSAKNSEKNLERRTNRGGRRLIRRKTNRLKDAKKILAAVGFYEDKSLKNSCPYQLRVKGLTEPLSRGEIYKVTLHILKKRGISYLDEVDTEAAKESQDYKEQVRKNAQLLTKYTPGQIQLQRLKENNRVKTGINAQGNYQLNVFKVSAYANELATILKTQQAFYPNELTDDWIALFVQPGIAEEAGLIYRKRPYYHGPGNEANNSPYGRWSDFQKTGEPATNIFDKLIGKDFQGELRASGLSLSAQQYNLLNDLTNLKIDGEVPLSSEQKEYILTELMTKEFTRFGVNDVVKLLGVKKERLSGWRLDKKGKPEIHTLKGYRNWRKIFAEAGIDLATLPTETIDCLAKVLTLNTEREGIENTLAFELPELSESVKLLVLDRYKELSQSISTQSWHRFSLKTLHLLIPELMNATSEQNTLLEQFQLKSDVRKRYSEYKKLPTKDVLAEIYNPTVNKTVSQAFKVIDALLVKYGKEQIRYITIEMPRDDNEEDEKKRIKELHAKNSQRKNDSQSYFMQKSGWSQEKFQTTIQKNRRFLAKLLYYYEQDGICAYTGLPISPELLVSDSTEIDHIIPISISLDDSINNKVLVLSKANQVKGQQTPYDAWMDGSFKKINGKFSNWDDYQKWVESRHFSHKKENNLLETRNIFDSEQVEKFLARNLNDTRYASRLVLNTLQSFFTNQETKVRVVNGSFTHTLRKKWGADLDKTRETHHHHAVDATLCAVTSFVKVSRYHYAVKEETGEKVMREIDFETGEIVNEMSYWEFKKSKKYERKTYQVKWPNFREQLKPVNLHPRIKFSHQVDRKANRKLSDATIYSVREKTEVKTLKSGKQKITTDEYTIGKIKDIYTLDGWEAFKKKQDKLLMKDLDEKTYERLLSIAETTPDFQEVEEKNGKVKRVKRSPFAVYCEENDIPAIQKYAKKNNGPLIRSLKYYDGKLNKHINITKDSQGRPVEKTKNGRKVTLQSLKPYRYDIYQDLETKAYYTVQLYYSDLRFVEGKYGITEKEYMKKVAEQTKGQVVRFCFSLQKNDGLEIEWKDSQRYDVRFYNFQSANSINFKGLEQEMMPAENQFKQKPYNNGAINLNIAKYGKEGKKLRKFNTDILGKKHYLFYEKEPKNIIK

SEQ ID NO: 179 - protein, 1150 aa, Enterococcus faecalis
MYSIGLDLGVSSVGWSVIDERTGNVIDLGVRLFSAKNSEKNLERRTNRGGRRLIRRKTNRLKDAKKILAAVGFYEDKSLKNSCPYQLRVKGLTEPLSKGEIYKVTLHILKKRGISYLDEDDTEAAKESQDYKEQVRENAQLLTKYTPGQIQLQRLKENNRVKTGINAQGNYQLNVFKVSAYANELATILKTQQAFYPNELTDDWIALFVQPGIAEEAGLIYRKRPYYHGPGNEANNSPYGRWSDFKKTGQPATNIFDKLIGKDFQGELRASGLSLSAQQYNLLNDLTNLKIDGEIPLSPEQKEYILAELMTKEFTRFGINDVAKLLGVKKERLSGWRLDKKGKPEIHTLKGYRNWRKIFAESGIDLATLPTETIDCLAKVLTLNTEREGIENTLAFELPELAESVKLLVLDRYKELSQSVSTQAWHRFSLKTLHLLIPELMNATSEQNTLLEQFQLKSDVRKRYSEYKKLPTKDVLTEIYNPTVNKTVSQAFKVIDALLVKYGKEQIRYITIEMPRDDNEEDEKKRIKELHAKNSQRKNDSQSYFMQKSGWSQEKFQTTIQKNRRFLAKLLYYYEQDGICAYTGLSISPELLVSDSTEIDHIIPISISLDDSINNKVLVLSKANQVKGQQTPYDAWMDGSFKKINGKFSNWDDYQKWVESRHFSHKKENNLLETRNIFDSEQVEKFLARNLNDTRYASRLVLNTLQSFFANQETKVRVVNGSFTHTLRKKWGADLDKTRETHHHHAVDATLCAVTPFVKVSRYHYAVKEETGEKVMREIDFETGEIVDEMSYREFKKSKKYERKTYQVKWPNFREQLKPVNLHPRIKFSHQVDRKANRKLSDATIYSVREKTEVKTLKSGKQKITTDEYTIGKIKDIYTVDGWEAFKKKQDKLLMKDLDEKTYERLLSIAETTPDFQEVEEKNGKVKRVKRSPFAVYCEENDIPAIRKYAKNNNGPLIRSLKYYDGKLNKHINITKDSQGRPVEKTKNGRKVTLQSLKPYRYDIYQDLETKAYYTVQLYYSDLRFVEGKYGITEKEYMKKVAEQTKGQVVRFCFSLQKNDGLEIEWKDSQCYDVRFYNFQSANSINFKGLEQEMMPAENQFKQKPYNNGAINLNIAKYGKEGKKLRKFNTDILGKKHYLYYEKEPKNIIK

SEQ ID NO: 180 - protein, 1345 aa, Streptococcus anginosus
MDQKYSIGLDIGTNSVGWAVVTDDYKVPAKKMKVLGNTDKQSIKKNLLGALLFDSGETAEATRLKRTARRRYTRRRNRLRYLQEIFAEEMNKVDENFFQRLDDSFLVDEDKRGERHPIFGNIAAEVKYHDDFPTIYHLRKHLADISQKADLRLVYLALAHMIKFRGHFLIEGQLKAENTNVQALFKDFVEVYDKTVEESHLSEMTVDALSILTEKVSKSRRLENLIAHYPAEKKNTLFGNLIALSLGLQPNFKTNFQLSEDAKLQFSKDTYEEDLEGLLGEIGDEYADLFASAKNLYDAILLSGILTVDDNSTKAPLSASMVKRYEEHQKDLKKLKDFIKVNAPDQYNAIFKDKNKKGYAGYIENGVKQDEFYKYLKGILLQINGSGDFLDKIDREDFLRKQRTFDNGSIPHQIHLQEMHAILRRQEEHYPFLKENQDKIEKILTFRIPYYVGPLARKGSRFAWAEYKADEKITPWNFDDILDKEKSAEKFITRMTLNDLYLPEEKVLPKHSLLYETFTVYNELTKVKYVNEQGEAKFFDANMKQEIFDHVFKENRKVTKDKLLNYLNKEFEEFRIVNLTGLDKENKAFNSSLGTYHDLRKILDKSFLDDKANEKTIEDIIQTLTLFEDREMIRQRLQKYSDIFTKAQLKKLERRHYTGWGRLSYKLINGIRNKENKKTILDYLIDDGYANRNFMQLINDDALSFKEEIARAQIIGDVDDIANVVHDLPGSPAIKKGILQSVKIVDELVKVMGHNPANIIIEMARENQMTDKGRRNSQQRLKLLQDSLKNLDNPVNIKNVENQQLQNDRLFLYYIQNGKDMYTGETLDINNLSQYDIDHIIPQAFIKDNSLDNRVLTRSDKNRGKSDDVPSIEVVHEMKSFWSKLLSVKLITQRKFDNLTKAERGGLTEEDKAGFIKRQLVETRQITKHVAQILDERFNTEFDGNKRRIRNVKIITLKSNLVSNFRKEFELYKVREINDYHHAHDAYLNAVVGNALLLKYPQLEPEFVYGEYPKYNSYRSRKSATEKFLFYSNILRFFKKEDIQTNEDGEIAWNKEKHIKILRKVLSYPQVNIVKKTEEQTGGFSKESILPKGESDKLIPRKTKNSYWNPKKYGGFDSPVVAYSILVFADVEKGKSKKLRKVQDMVGITIMEKKRFEKHPVDFLEQRGYRNVRLEKIIKLPKYSLFELENKRRRLLASARELQKGNELVIPQRFTTLLYHSYQIEKNYEPEHREYVEKHKDEFKELLEYISVFSRKYVLADNNLTKIEMLFSKNKDAEVSSLAKSFISLLTFTAFGAPAAFNFFGENIDRKRYTSVTECLNATLIHQSITGLYETRIDLSKLGED

SEQ ID NO: 181 - protein, 849 aa, Listeria ivanovii
  misc_feature (780)..(780): Xaa can be any naturally occurring amino acid
LIDKNGTPQHITMIDKMRGKCTYFPEEVRIAKMSYTAELFGLLNDFNNIYFADPETGEKIGFTEADKKYFIDTFIHDQKGVKNITLKQIMKHKNIINETDIFGYRINTKNGTPIFTEFKGLKALKKALKEVDLPDEFYQNTEMMDEIANILSSEKSFTRREEQLKELFLAAFNDELEEAVKELINDITFKEFHSLSKKAIMVILPELWSTNQNQMQLFVQHKMDKSRLENLQNGTKIQFDDEAILSTIAKRAHRETIKIVDAVRAKYGELDYVIVEMAREKNSDEQKKVYNRAQKKQGDFEKEMCKLLGVSELKELRLNGKQHLALKFWKEQDGKCIYSGKPIALSDIVNNFNGLLEIDHIIPISISYDDSQQNKVLCLRSENQRKGQLSPYQYLIRGMGERSFDAFKAEVLSRHFGKKKQNYLLEMEDIANNDELRKHFINRNLVDTRYAMRTFSNTLKTFYTVNGIPTKVMPVNGAMTSALRKRAKLNKDRDAGHAHHAIDALIVAAIGRLPLIKQLAELRVNEEGEFADKITDKGLDDKTAFDDKTLKFLRNLLNYESKVKYSHKVDRKPNRSLSKQTLYSTREKDGEKYIIGKVKNIYTLDKAGYAALKKRIDKNPEDFLMAQHNPKTWEEIIKIMEVYSKADNPFKEFYDEHGFIMKDGKVPVKSLRYHDKKLGIHVPLTHKYENTRHDVVLLKRNSLRVDIYMNKEGVYKYQGVPYNWFNQKGDKYILDMEKYHNEIDGTRASFKNIDNTFEFQFSLYKNDVFSYMKKDKEGEXVSYTKLFRSDSSPRENRLEVENIDMRTSSQQMPTINPLKNLIKYNTDILGNTYPIQKEKFVTVFTLHSK

SEQ ID NO: 182 - protein, 1457 aa, Prevotella buccae
MKTILGLDLGTNSIGWAKVSVDDYGNYLHDIKLGSRIIPMSQDVLGNFDSGVTVSQTAQRTEFRSKRRLVQRNLQRRERLHRVLHVLDFLPAHYDAAIGWDRTEAVTYGKFLNHAEPKLAWEELGNGKRRFLFMDSFHEMVADFARCQPALVADGKKIPLDWTIYYLRKKALTQAITKEELAWILLNFNQKRGYYQLRGEEEEENPTKQEEYYELKVVSVEATDSRKGNDTWYNVHLENGWIYRRSSKISLDDWVGKVKQFIVTTEYEKDGATLKTDKEGYVKRSFRAPNENDWGLRKKRTETLLEMSGKTVGAFIYDHLLQEPADKIRGNFIRTIERHYYKAELEAILAEQCKYHIELRDKEMLEACARELYLNNLPHQRSLMKKDMTYLLLYDLIFYQRPLKSKKALIANCPYEYYEYVDKETGEIKRQNIKCIAKSNPYFQEFRLWQFVLNLRLFDRVEDKEVTANYLPTADDHARLFTYLNDRKEINQETLLKDYFKLKKVKIGNEKEYPIRWNYIEDKEKKYPCNETRYELLMALDRAGIEHKWLDDNNLEYRLWHLLYSVEVKSESETALRKLKNDDAFVNSFLKVKPFKKEYGAYSEKAIKRLLAVMRKGFLWNEQDICDETRKRIEIIIKGDVDEKVKERMGHAAYSFDRVSDFQGLPEWLACYVVYGRHSEAMDIQHWDSPERLMAYINNFKQYSLRNPIVEQCILETLRTVHDIWKETGQIDEIHVELGREMKSTSEERARRTQNVLRNENTNLRIKSLLIELKNDTDICNVHPYSPMQQEILRIYEEGALQELNREDEDFEEISKISQMSQPSGKELNRYKLWLEQKYRSPYTGKAISLAKLFTPAYQIEHVIPQSRYFDDSFTNKVICEAEVNTLKSNLLGYEFIKKHGGEIIHCTTLGDVRIFSESEYKAFVMDHYANNKSKKDKLLMEDIPQEFLSRQMNDSRYISKVVKTLLSNIVRMADESEATSKSVIVCTGGVTDRLKKDWGLNDVWNSIVYSRFERLNRLTGTEAFGHWENKDGKRVFQTSMPLELQRGFRKKRIDHRHHAMDALVIACASRNIVNYLNNESANNPKKREDLRRQLCDKNRVIRKPWETFTQDAYNALENVVVSFKNYVRVINKATNRYEHYDENGKKRFVQQKGSELWAIRKPMHKETYYGHVNLRRKELVTLQKALDDIPSICDKKLRDYISALVEKHFNKRQLLAHFKSTDYYWQKQYVNKVYVWTFSDDIKPLVATRKLLDTSFDAKRIGTITDTGIQKILRNYLEAKGGNATLAFTPEGIAEMNQNISKYNDGKPHQPILKVRITEPMGAKYRVGQTGNKMAKYVEAQSGTNLYFAIYEDSEGKRSYTTVPLDEVAERLKQRLSPVPEKDENDVPLKFYLSPNDLVYVPTEEELQLRECKLNKDRIYKMVSSTGNECHFIPYYVANVIYNKGGFNMQMHRPQS

SEQ ID NO: 183 - protein, 1330 aa, Enterococcus italicus
MKNDYTIGLDIGTNSVGYSVVTDDYKVISKKMNVFGNTEKKSIKKNFWGVRLFESGQTAQEARMKRTSRRRIARRKNRICYLQEIFQPEMNHLDNNFFYRLNESFLVADDAKYDKHPIFGTLDEEIHFHEQFPTIYHLRKYLADGDEKADLRLVYLAIAHIIKFRGNFLIEGELNTENNSVIELSKVFVQLYNQTLSELEGFQFIDESIDFSEVLTQQLSKSERADNVLKLFPDEKGTGIFAQFIKLIVGNQGNFKKVFQLEEDQKLQLSTDDYEENIENLLAIIGDEYGDIFVAAQNLYQAILLAGILTSTEKTRAKLSASMIQRYEEHAKDLKLLKRFVKEHIPDKYAEIFNDATKNGYAGYIDGKTKEEEFYKYLKTTLVQKSGYQYFIEKIEQENFLRKQRIYDNGVIPHQVHAEELRAILRKQEKYYSFLKENHEKIEQIFKVRIPYYVGPLAKHNEQSRFAWNIRKSDEPIRPWNMNDVVDENASAVAFIERMTIKDIYLNENVLPRHSLIYEKFTVFNELTKVLYADDRGVFQRFSAEEKEDIFEKLFKSERKVTKKKLENYLRIELSISSPSVKGIEEQFNANFGTYLDLKKFDELHPYLDDEKYQDTLEEVIKVLTVFEDRSMIQNQLEQLPLNLSTKTIKALSRRKYTGWGRLSARLIDGIHDKNSGKTILDYLIEDESDSYIVNRNFMQLINDDHLSFKKIIEDSQPYKEQQSAEEIVSELSGSPAIKKGILQSLKIVDELVAIMGYKPKNIVVEMARENQTTGRGKQNSKPRLKGIENGLKEFSDSVLKGSSIDNKQLQNDRLYLYYLQNGKDMYTGHELDIDHLSTYDIDHIIPQSFLTDNSIDNRVLTTSKSNRGKSDNVPSEEVVRKMDRFWRKLLNAKLISERKYTNLTKKELTESDKAGFLKRQLVETRQITKHVATILDSKFNEDSNNRDVQIITLKSALVSEFRKTFNLYKVREINDLHHAHDAYLNAVVALSLLRVYPQLKPEFVYGEYGKNSIHDQNKATIKKQFYSNITRYFASKDYIINDDGEILWNKQETIAQVIKTLGMHQVNVVKKVEIQKGGFSKESIQPKGESQKLIRRKQQWNTKKYGGFDSPVVAYAILLSFDKGKRKARSFKIVGITIQDRESFEGNPILYLSKKDYHNPKVEAILPKYSLFEFENGRRRMVASASETQKGNQLIIPGHLMELLYHSKKIINGKNSDSVSYIQNNKEKFREIFEYIVDFSSKYISADANLNKIEKIFENNFHKASEQEIAKSFINLLTFTAMGAPADFEFFGEKIPRKRYVSISEIIDAVFIHQSITGLYETRVRLTEV

SEQ ID NO: 184 - protein, 1123 aa, Mobiluncus curtisii
MFVYLNSPRGFGPATFLTDLPHFCIIFGNNDFMDNRKYHVGIDVGTNSVGFAAVEVGDSGSPIRFLNTMVVIHDSGVDPEQKKYAITRLASAGTARRTRRLYRTRRQRLRELDDFISNELGYPLVNLENFADPYEPWKVRADLATIKLPADELPEAMSIALRHMARHRGWRSPYQRVEALHLHAEISEEFSALKKRVMEKTGDVFSDDATPAEVLVDLMGRQKIRGADGMLSGKLRQSDNANELRKIASVQGIDDETLNRIIDRVFFSRSPKGKASERVGMDALPGQGSKPRALKAMPSFQKFRIVSVICNLRIKDSGDDNRPLSMEEKEQLIGYLMSSTTDDHVTWTDVAELLHVKRSNLQGTAKEGPDGERPYTRPPVNSAWSKIKDSKIKSLVALWKTGDVDVQSAIVEALSNASVLEDARPGADIVVAYLESLDDKELESLDKVGLPAGRASYSEDSLERLTERMLQDDCDLFEARKREFGVSDDWKPPADPIYAPVGNPGVDRVLKIVNRLLMAAEREWGAPTQINIEHVRSGFSSELMQREFERENERRRAQNEEAVKAILTEKGGNSHVSKYDIIRYYAVKRQNCQCLYCGTPITFSDCELDHIVPRKGVGSTNSRVNLAAACRSCNRDKSNLPFAVWAGKTSNFDVSIDGAVSRVKQWQRSQNEGAREFRAFQNEVISRLLKTTEDPEIDSRSLESVAWMARELHHRVEYYFQSKGAQTQVSVYRGAVTAQARKSSGLEDKVKMIGGGGKTRLDRRHHAMDAATIALMTPGISTTLSEKNNLRDAQKFTGQSETWKDYCGRTETAREHFAVWKSNMERLTDLFNDKLENDAIPVVQPLRLRLSDSKAHDDGIGKLDSKKLGSVWSLADIDRAATPQIWTALTRCDDFDPTKGLPENANRVIRAQGVKYESEDNIPVFPSNVAAIAVRDGYAEIGSTIHHARIYRIDDGKKIFYSMIRVFAVDLLKHQAEDLFTVKLPPSAISIRTCEDSLRRALSNGTAEYLGWLVPGDEIIVDTSDKAFHTGQIGDLLRNFPVNSFRLTGFPSNSRLRLKPVLLAGEGLRDDAEDSIKKILSGQGWRPAINVLFSKGKPRIVRRNSLGIERPSSNNGLPFSWEA

SEQ ID NO: 185 - protein, 1054 aa, Staphylococcus lugdunensis
MNQKFILGLDIGITSVGYGLIDYETKNIIDAGVRLFPEANVENNEGRRSKRGSRRLKRRRIHRLERVKKLLEDYNLLDQSQIPQSTNPYAIRVKGLSEALSKDELVIALLHIAKRRGIHKIDVIDSNDDVGNELSTKEQLNKNSKLLKDKFVCQIQLERMNEGQVRGEKNRFKTADIIKEIIQLLNVQKNFHQLDENFINKYIELVEMRREYFEGPGKGSPYGWEGDPKAWYETLMGHCTYFPDELRSVKYAYSADLFNALNDLNNLVIQRDGLSKLEYHEKYHIIENVFKQKKKPTLKQIANEINVNPEDIKGYRITKSGKPQFTEFKLYHDLKSVLFDQSILENEDVLDQIAEILTIYQDKDSIKSKLTELDILLNEEDKENIAQLTGYTGTHRLSLKCIRLVLEEQWYSSRNQMEIFTHLNIKPKKINLTAANKIPKAMIDEFILSPVVKRTFGQAINLINKIIEKYGVPEDIIIELARENNSKDKQKFINEMQKKNENTRKRINEIIGKYGNQNAKRLVEKIRLHDEQEGKCLYSLESIPLEDLLNNPNHYEVDHIIPRSVSFDNSYHNKVLVKQSENSKKSNLTPYQYFNSGKSKLSYNQFKQHILNLSKSQDRISKKKKEYLLEERDINKFEVQKEFINRNLVDTRYATRELTNYLKAYFSANNMNVKVKTINGSFTDYLRKVWKFKKERNHGYKHHAEDALIIANADFLFKENKKLKAVNSVLEKPEIESKQLDIQVDSEDNYSEMFIIPKQVQDIKDFRNFKYSHRVDKKPNRQLINDTLYSTRKKDNSTYIVQTIKDIYAKDNTTLKKQFDKSPEKFLMYQHDPRTFEKLEVIMKQYANEKNPLAKYHEETGEYLTKYSKKNNGPIVKSLKYIGNKLGSHLDVTHQFKSSTKKLVKLSIKPYRFDVYLTDKGYKFITISYLDVLKKDNYYYIPEQKYDKLKLGKAIDKNAKFIASFYKNDLIKLDGEIYKIIGVNSDTRNMIELDLPDIRYKEYCELNNIKGEPRIKKTIGKKVNSIEKLTTDVLGNVFTNTQYTKPQLLFKRGN

SEQ ID NO: 186 - protein, 586 aa, Pseudoramibacter alactolyticus
MTYYLGLDMGTGSVGWAATDKNYKLIRAKGKDLWGVRLFQTAKTAAERRSHRVARLRRQREKVRIGYLKTIFSDAINKVDPGFFQRLDDSFFYAEDKNINQPYALFADTGYTDVDYYRDYPTIFHLRSTLIHDTSPKDVRLVYLAVLNMFKHRGHFLASNLSENGVDDFGDIYQQWCKSVPKPVQISDPEAKTEKIENILSKAGISNTRRLEALLEVFGIKRRDAFAEVLKLWCGLKGNLSKIWSETDFSDLDNTKPALSFKDSNLDMVLSQLEEILPDEDYSWLMLTKQIYDWSLLSGMMKDASGKSYDYLSDARVASYQKHSEDLKTLKRFYHDNHLSAAYDQMFRVMGKDNYSAYAGSVQSKKEVVRRGASCGIEELYKRIKKDLKPVPDCETKQIILENIERGTFLPKQLTRDNGVIPNQIHVHELKAILKNAENYLPFLKEGSELTNSEKILQLFQFQIPYYVGPLYSDENNYAWVVRKEGGRVFPWNFAEKVDEKASAEGFISELVARCTYLDNEKVLPKASLLYEKFMVLNELNNLRINGERISVDIKQELYQNLFTRGKKVTLKKSEGLFGGQRIFCL

SEQ ID NO: 187 - protein, 1385 aa, Gemella morbillorum
MKNKTWYLGLGVGPTSIGWAATDSNYKLLRKNKKRLWGVRLFEEAKTAVDRRTFRAERRRLARRKWRISLLEELFAKEVSKNDPNFFLRLKESKYHFEDKSLMNEYILFNDKDYTDKDYYKEYPTIYHLRLSLTTEENPDIRKVYLAVHSMLKNRGHFLLQGQSFNDSNIDSVIKELLELETVKINFEVTDEVIHSLKKIALEKKNLSDKNNDVKKLYPKEKQLQEIFKLVFGGKTSLDKLYDIEEYKELDNSVKSISFKEKVYEEVRPDYEQILSNYIELLDLAKLVYDSIVLADIKKEGKTISESKVELYNKHKDDLANLKKLVKIDSKLSEDKKKEVYFTIFKEDKEKGTNYVNYTHRSQEGKSCSYEDFKKFLKKELEKLEDSPTKTTILEELDLETFLPLQRTKDNSVVPYQIHKEELVKILDNAAKYHSFLAEKDDSGYSTREKVVQLFEFRIPYYIGPLNAHHNTENGGYSWAIRKKGMESVPVTPWNFKDVIDESASAEAFVNNLKNKCAYLSGEDVLPKNSLLYSEYALLNELNALRYEGNRISVEARDVIVTKLFKEQGKKVTKKTIKELLKTEGFIDGKGEIVGIDNIVKNDLKSYRDFKKILADKFDKERVENIILWITLYGESRKLIKEKITKVYGDFYTVDEIEKMSRLTYKDWGILSRKLLTELVSEKLYNEETGECLNIIGAMRQGTILFMELLADKFDYMSQIKNHNKENKDDITEITPDILENLHASPAVKRSIWQTVRIVEELKTIIGCVPTKIFIETTKRNNAPYKVPTLNRNDLVTKYKTIREHEIFELEKELKNTLDFTLNKNRLINEEPSKLKATKLYLYYTQLGRCMYTGKKIDLGELFDNNNKYDIDHIYPQSKVKDGSFNNIVLVTKASNDMKADVFPLKSKFQTKENKIFWRFLKEKKLITEEKYNRLVRTEEFSNGELTGFITRQLVETSQAIKVISNVLRELNPETTICYSKAENVSSFRQSFGKIKEANRKAENNEKLIRVQEINDYYNAKDAYLSIVVGNVYDVKFTRNVHNFIKNNKDARRYSLNGLFYTDVKNANTIAWEMDKTVHVVEKTMNNNNILITRRTSEQKGALYDATLYKAKVAEKAKEGTYYPLKTTDSKIKDVGKYGGFTKIKIAYYSIFEYTLDGKKGKQKITRIVPIPIYISQNIKDDKALLEYAQTRLPGKDLKIKYRKLCIGSLVKINNFNYYIGGKTNNNFTFDSAVQVILDKDSESYIKELAKYLNWKKENKDGKLWESITEDKNIQLYDSLVKKMNTGIFIRKTPNKYTELLTLEVKNKFINIDIDEQVKLLLEILNLLTNKKFTSKLNEIGITASRGVCSFNLSNQSQFSIIEQSVTGVYEKEKLIIEKKKEGIL

SEQ ID NO: 188 - protein, 1029 aa, Alicycliphilus denitrificans
MRSLRYRLALDLGSTSLGWALFRLDACNRPTAVIKAGVRIFSDGRNPKDGSSLAVTRRAARAMRRRRDRLLKRKTRMQAKLVEHGFFPADAGKRKALEQLNPYALRAKGLQEALLPGEFARALFHINQRRGFKSNRKTDKKDNDSGVLKKAIGQLRQQMAEQGSRTVGEYLWTRLQQGQGVRARYREKPYTTEEGKKRIDKSYDLYIDRAMIEQEFDALWAAQAAFNPTLFHEAARADLKDTLLHQRPLRPVKPGRCTLLPEEERAPLALPSTQRFRIHQEVNHLRLLDENLREVALTLAQRDAVVTALETKAKLSFEQIRKLLKLSGSVQFNLEDAKRTELKGNATSAALARKELFGAAWSGFDEALQDEIVWQLVTEEGEGALIAWLQTHTGVDEARAQAIVDVSLPEGYGNLSRKALARIVPALRAAVITYDKAVQAAGFDHHSQLGFEYDASEVEDLVHPETGEIRSVFKQLPYYGKALQRHVAFGSGKPEDPDEKRYGKIANPTVHIGLNQVRMVVNALIRRYGRPTEVVIELARDLKQSREQKVEAQRRQADNQRRNARIRRSIAEVLGIGEERVRGSDIQKWICWEELSFDAADRRCPYSGVQISAAMLLSDEVEVEHILPFSKTLDDSLNNRTVAMRQANRIKRNRTPWDARAEFEAQGWSYEDILQRAERMPLRKRYRFAPDGYERWLGDDKDFLARALNDTRYLSRVAAEYLRLVCPGTRVIPGQLTALLRGKFGLNDVLGLDGEKNRNDHRHHAVDACVIGVTDQGLMQRFATASAQARGDGLTRLVDGMPMPWPTYRDHVERAVRHIWVSHRPDHGFEGAMMEETSYGIRKDGSIKQRRKADGSAGREISNLIRIHEATQPLRHGVSADGQPLAYKGYVGGSNYCIEITVNDKGKWEGEVISTFRAYGVVRAGGMGRLRNPHEGQNGRKLIMRLVIGDSVRLEVDGAERTMRIVKISGSNGQIFMAPIHEANVDARNTDKQDAFTYTSKYAGSLQKAKTRRVTISPIGEVRDPGFKG

SEQ ID NO: 189 - protein, 1422 aa, Sutterella wadsworthensis
MTQSERRFSCSIGIDMGAKYTGVFYALFDREELPTNLNSKAMTLVMPETGPRYVQAQRTAVRHRLRGQKRYTLARKLAFLVVDDMIKKQEKRLTDEEWKRGREALSGLLKRRGYSRPNADGEDLTPLENVRADVFAAHPAFSTYFSEVRSLAEQWEEFTANISNVEKFLGDPNIPADKEFIEFAVAEGLIDKTEKKAYQSALSTLRANANVLTGLRQMGHKPRSEYFKAIEADLKKDSRLAKINEAFGGAERLARLLGNLSNLQLRAERWYFNAPDIMKDRGWEPDRFKKTLVRAFKFFHPAKDQNKQHLELIKQIENSEDIIETLCTLDPNRTIPPYEDQNNRRPPLDQTLLLSPEKLTRQYGEIWKTWSARLTSAEPTLAPAAEILERSTDRKSRVAVNGHEPLPTLAYQLSYALQRAFDRSKALDPYALRALAAGSKSNKLTSARTALENCIGGQNVKTFLDCARRYYREADDAKVGLWFDNADGLLERSDLHPPMKKKILPLLVANILQTDETTGQKFLDEIWRKQIKGRETVASRCARIETVRKSFGGGFNIAYNTAQYREVNKLPRNAQDKELLTIRDRVAETADFIAANLGLSDEQKRKFANPFSLAQFYTLIETEVSGFSATTLAVHLENAWRMTIKDAVINGETVRAAQCSRLPAETARPFDGLVRRLVDRQAWEIAKRVSTDIQSKVDFSNGIVDVSIFVEENKFEFSASVADLKKNKRVKDKMLSEAEKLETRWLIKNERIKKASRGTCPYTGDRLAEGGEIDHILPRSLIKDARGIVFNAEPNLIYASSRGNQLKKNQRYSLSDLKANYRNEIFKTSNIAAITAEIEDVVTKLQQTHRLKFFDLLNEHEQDCVRHALFLDDGSEARDAVLELLATQRRTRVNGTQIWMIKNLANKIREELQNWCKTTNNRLHFQAAATNVSDAKNLRLKLAQNQPDFEKPDIQPIASHSIDALCSFAVGSADAERDQNGFDYLDGKTVLGLYPQSCEVIHLQAKPQEEKSHFDSVAIFKEGIYAEQFLPIFTLNEKIWIGYETLNAKGERCGAIEVSGKQPKELLEMLAPFFNKPVGDLSAHATYRILKKPAYEFLAKAALQPLSAEEKRLAALLDALRYCTSRKSLMSLFMAANGKSLKKREDVLKPKLFQLKVELKGEKSFKLNGSLTLPVKQDWLRICDSPELADAFGKPCSADELTSKLARIWKRPVMRDLAHAPVRREFSLPAIDNPSGGFRIRRTNLFGNELYQVHAINAKKYRGFASAGSNVDWSKGILFNELQHENLTECGGRFITSADVTPMSEWRKVVAEDNLSIWIAPGTEGRRYVRVETTFIQASHWFEQSVENWAITSPLSLPASFKVDKPAEFQKAVGTELSELLGQPRSEIFIENVGNAKHIRFWYIVVSSNKKMNESYNNVSKS

SEQ ID NO: 190 - protein, 1132 aa, Nitratifractor salsuginis
MKKILGVDLGITSFGYAILQETGKDLYRCLDNSVVMRNNPYDEKSGESSQSIRSTQKSMRRLIEKRKKRIRCVAQTMERYGILDYSETMKINDPKNNPIKNRWQLRAVDAWKRPLSPQELFAIFAHMAKHRGYKSIATEDLIYELELELGLNDPEKESEKKADERRQVYNALRHLEELRKKYGGETIAQTIHRAVEAGDLRSYRNHDDYEKMIRREDIEEEIEKVLLRQAELGALGLPEEQVSELIDELKACITDQEMPTIDESLFGKCTFYKDELAAPAYSYLYDLYRLYKKLADLNIDGYEVTQEDREKVIEWVEKKIAQGKNLKKITHKDLRKILGLAPEQKIFGVEDERIVKGKKEPRTFVPFFFLADIAKFKELFASIQKHPDALQIFRELAEILQRSKTPQEALDRLRALMAGKGIDTDDRELLELFKNKRSGTRELSHRYILEALPLFLEGYDEKEVQRILGFDDREDYSRYPKSLRHLHLREGNLFEKEENPINNHAVKSLASWALGLIADLSWRYGPFDEIILETTRDALPEKIRKEIDKAMREREKALDKIIGKYKKEFPSIDKRLARKIQLWERQKGLDLYSGKVINLSQLLDGSADIEHIVPQSLGGLSTDYNTIVTLKSVNAAKGNRLPGDWLAGNPDYRERIGMLSEKGLIDWKKRKNLLAQSLDEIYTENTHSKGIRATSYLEALVAQVLKRYYPFPDPELRKNGIGVRMIPGKVTSKTRSLLGIKSKSRETNFHHAEDALILSTLTRGWQNRLHRMLRDNYGKSEAELKELWKKYMPHIEGLTLADYIDEAFRRFMSKGEESLFYRDMFDTIRSISYWVDKKPLSASSHKETVYSSRHEVPTLRKNILEAFDSLNVIKDRHKLTTEEFMKRYDKEIRQKLWLHRIGNTNDESYRAVEERATQIAQILTRYQLMDAQNDKEIDEKFQQALKELITSPIEVTGKLLRKMRFVYDKLNAMQIDRGLVETDKNMLGIHISKGPNEKLIFRRMDVNNAHELQKERSGILCYLNEMLFIFNKKGLIHYGCLRSYLEKGQGSKYIALFNPRFPANPKAQPSKFTSDSKIKQVGIGSATGIIKAHLDLDGHVRSYEVFGTLPEGSIEWFKEESGYGRVEDDPHH

SEQ ID NO: 191 - protein, 1327 aa, Solobacterium moorei
MEGQMKNNGNNLQQGNYYLGLDVGTSSVGWAVTDTDYNVLKFRGKSMWGARLFDEASTAEERRTHRGNRRRLARRKYRLLLLEQLFEKEIRKIDDNFFVRLHESNLWADDKSKPSKFLLFNDTNFTDKDYLKKYPTIYHLRSDLIHNSTEHDIRLVFLALHHLIKYRGHFIYDNSANGDVKTLDEAVSDFEEYLNENDIEFNIENKKEFINVLSDKHLTKKEKKISLKKLYGDITDSENINISVLIEMLSGSSISLSNLFKDIEFDGKQNLSLDSDIEETLNDVVDILGDNIDLLIHAKEVYDIAVLTSSLGKHKYLCDAKVELFEKNKKDLMILKKYIKKNHPEDYKKIFSSPTEKKNYAAYSQTNSKNVCSQEEFCLFIKPYIRDMVKSENEDEVRIAKEVEDKSFLTKLKGTNNSVVPYQIHERELNQILKNIVAYLPFMNDEQEDISVVDKIKLIFKFKIPYYVGPLNTKSTRSWVYRSDEKIYPWNFSNVIDLDKTAHEFMNRLIGRCTYTNDPVLPMDSLLYSKYNVLNEINPIKVNGKAIPVEVKQAIYTDLFENSKKKVTRKSIYIYLLKNGYIEKEDIVSGIDIEIKSKLKSHHDFTQIVQENKCTPEEIERIIKGILVYSDDKSMLRRWLKNNIKGLSENDVKYLAKLNYKEWGRLSKTLLTDIYTINPEDGEACSILDIMWNTNATLMEILSNEKYQFKQNIENYKAENYDEKQNLHEELDDMYISPAARRSIWQALRIVDEIVDIKKSAPKKIFIEMAREKKSAMKKKRTESRKDTLLELYKSCKSQADGFYDEELFEKLSNESNSRLRRDQLYLYYTQMGRSMYTGKRIDFDKLINDKNTYDIDHIYPRSKIKDDSITNRVLVEKDINGEKTDIYPISEDIRQKMQPFWKILKEKGLINEEKYKRLTRNYELTDEELSSFVARQLVETQQSTKALATLLKKEYPSAKIVYSKAGNVSEFRNRKDKELPKFREINDLHHAKDAYLNIVVGNVYDTKFTEKFFNNIRNENYSLKRVFDFSVPGAWDAKGSTFNTIKKYMAKNNPIIAFAPYEVKGELFDQQIVPKGKGQFPIKQGKDIEKYGGYNKLSSAFLFAVEYKGKKARERSLETVYIKDVELYLQDPIKYCESVLGLKEPQIIKPKILMGSLFSINNKKLVVTGRSGKQYVCHHIYQLSINDEDSQYLKNIAKYLQEEPDGNIERQNILNITSVNNIKLFDVLCTKFNSNTYEIILNSLKNDVNEGREKFSELDILEQCNILLQLLKAFKCNRESSNLEKLNNKKQAGVIVIPHLFTKCSVFKVIHQSITGLFEKEMDLLK

SEQ ID NO: 192 - protein, 738 aa, Treponema phagedenis
MLQELFAKEIAKIDEGFFRRLDESAFYLEDKSLKQKYSLFNDDNFTDKDYYKKFPTIHHLIKALINDETHVDIRLLYLACHTIIKNRGHFLFEGKEFNTESRFDDAINELFSYLRQDMEIDFAFEDKIADIKEILENKKIGMRDKQNALNKKLSIAPKDKQKKEIIKLIVGASFNLKTLFNDEKYSSEKESYSFAKSNYEEKEAVLESLLGDGFGLILRAKAVYDSSVLSEILGNETYLSFAKVKIYDKHKEDLAKLKKVIKTYHADEFKKVFAEANIQGNYCSYVGSCKKNGKKVPIEKRADKDAFYDFLKKILKDEKAKNSDADYAFILNEIELKTFLPKQVSKKNANIPYQLRRMELEKIVNNAEKYFSFLSEKDEYGTVKEKIIQLLTFKRPYYIGIIQDTHKEKFPDRCWVVKKENAKNEKITPWNFYDHIDEDKTAEAFITSRTNKCTYLIGEDVLPRNSLLYMEYTVLNELNNLKVSVDGVNIFDVKLKKKIYEQVFKQRKEVSKKTIADFLKKEGICKKENDVVITGIDEKCTTSLKLYIDIKKIIGKRIEEEPTKNALEDIILWASIYDEGEGRKILEAKIQSVYPDVFTQDELNKILKLKISGWGRFSRKFLESIVASFPGFTDTINIITAMRETNFNLMELLGDAYGFSKGIEKFNSKFNDDKKVFSYDKLVKDLYLSPSVKRMLWRALVIVKEVKSIMGKDPKKYLLKWQEEKKLKREGLPPAMQV

SEQ ID NO: 193 - protein, 1377 aa, Streptococcus equinus
MEKTYSIGLDIGTNSVGWAVITDDYKVPAKKMKVLGNTDKKYIKKNLLGALLFDSGETAEATRLKRAARRRYTRRKNRLRYLQEIFAKEMAKVDESFFQRLEESFLTDDDKTFDSHPIFGNKAEEDTYHQEFPTIYHLRKHLADSPEKVDLRLVYLALAHMIKFRGHFLIEGQLNAENTDVQKIFADFVGVYDRTFDDSHLSEITVDAASILTEKISKSRRLENLIKQYPTEKKNTLFGNLVALALGLQPNFKTNFKLSEDAKLQFSKDTYDEDLEELLGKIGDDYADLFTAAKNLYDAILLSGILTVDDNSTKAPLSASMIKRYEEHHEDLEKLKTFIKVNNFDKYHEIFKDKSKNGYAGYIENGVKQDIFYKHLKSIISEKNGGQYFLDKIEREDFLRKQRTFDNGSIPYQIHLQEMRTILRRQGEYYPFLKENQAKIEKILTFRIPYYVGPLARKNSRFAWAKYHSDEPITPWNFDEVVDKEKSAEKFITRMTLNDLYLPEEKVLPKHSYVYETFAVYNELTKIKYVNEQGKSFFFDANMKQEIFDHVFKENRKVTKAKLLSYLNNEFEEFRINDLIGLDKDSKSFNASLGTYHDLKKILDKSFLDDKTNEQIIEDIVLTLTLFEDRDMIHERLQKYSDIFTSQQLKKLERRHYTGWGRLSYKLINGIRNKENNKTILDFLIDDGDANRNFMQLINDDSLSFKTTIQEAQVVGDVDDIEAVVHDLPGSPAIKKGILQSVKIVDELVKVMGHNPQNIVIEMARENQITGYGRNRSNQRLKRLQDSLKEFGSDILSKKKPSYVDSKVENSHLQNDRLFLYYIQNGKDMYTGEELDIDHLSDYDIDHIIPQAFIKDNSIDNRVLTSSAKNRGKSDDVPSIEIVRNRKSYWYKLYKSGLISKRKFDNLTKAERGGLTETDKAGFIKRQLVETRQITKHVAQILDARFNTKCDENDKVIRDVKVITLKSSLVSQFRKEFKFYKVREINDYHHAHDAYLNAVVGTALLKKYPKLAPEFVYGEYKKYDVRKLVAKSSDNHSELGKATAKYFFYSNLMNFFKTEVKYADGRVFERPDIETNADGEVVWNKQRDFNIVRKVLSYPQVNIVKKVEVQTGGFSKESILPKGDSDKLIPRKTKKLQWETQKYGGFDSPTVAYSVLVVADVEKGKTRKLKTVKELVGISIMERSSFEENPVSFLEKKGYHNVQEDKLIKLPKYSLFEFEGGRRRLLASATELQKGNEVVLPQYMVNLLYHSQHVNNSHKPEHLNYVKQHKDEFKDIFNLIISIARINILKPKVVDNLINEFTEYGQEDISSLSESFINLLKFISFGAPGAFKFLKLDVKQSNLRYKSTTEALSATLIHQSVTGLYETRIDLSKLGEE

SEQ ID NO: 194 - protein, 1128 aa, Streptococcus vestibularis
MSDLVLGLDIGIGSVGVGILNKVTGEIIHKNSRIFPAAQAENNVERRTNRQGRRLTRRKKHRRVRLNHLFEESGLITDFTKVSINLNPYQLRVKGLIDELSNEELFIALKNMVKHRGISYLDDASDDGNSSVGDYAQIVKENSKQLETKTPGQIQLERYQKYGQLRGDFTVEEDGKKHRLINVFPTSAYRSEALRILQTQKEFNPQITDEFINRYLEILTGKRKYYHGPGNEKSRTDYGRYTTKKDSENEYITLDNIFGILIGKCTFYPEEYRAAKASYTAQEFNLLNDLNNLTVPTETKKLSEEQKNQIINYVKNEKAMGPAKLFKYIAKLLSCDVADIKGYRIDKSDKAEIHTFEAYRKMKTLETIDFEKMSRDQLDKLAYVLTLNTEREGIQEALDHEFADGNFSQEQIDELVQFRKANSSIFGKGWHNFSVKLMMELIPELYATSEEQMTILTRLGKQKTTSSSNKTKYIDEKLLTEEIYNPVVAKSVRQAIKIVNAAIKEYGDFDNIVIEMARETNEDDEKKAIQKIQKANKDEKDAAMLKAANQYNGRAELPHSVFHGHKQLATKIRLWHQQGERCLYTGKTISIHDLINNPNQFEIDHILPLSITFDDSLANKVLVYATANQEKGQRTPYQALDSMDDAWSFRELKAFVRESKSLSNKKKEYLLTEEDISRFDVRKKFIERNLVDTRYASRVVLNALQEHFRAHKTDTKVSVVRGQFTSQLRRHWGIEKTRDTYHHHAVDALIIAASSQLNLWKKQKNTLVNYSENQLLDIETGELISDDEYKESVFKAPYQHFVDTLKSKEFEDSILFSYQVDSKFNRKISDATIYATRQAKVGKDKKDETYVLGKIKDIYSQTGYDAFIKIYQKDKSKFLMYRHDPQTFEKVIEPILENYPNKEMNEKGKEVPCNPFLKYKEEHGDYIRKYSKKGNGPEIKSLKYYDSKLGNHIDITPKDSNNKVVLQSVSPWRADVYFNKTTGKYEILGLKYADLQFEKGTGTYKISQEKYNVIKKKEGVDSDSEFKFTLYKNDLLLIKDTETKEQQLFRFLSRTKPNVKHYVELKPYDKQKFEGNESLINVLGAVAKGGQCQKGINKPNISIYKVRTDVLGNQHIIKNEGDKPKLDF

SEQ ID NO: 195 - protein, 1080 aa, Methylocystis sp.
MRVLGLDGGIASIGWALIEIFEDHEPSDGRIIDTGAWMFDAPEEKSQTGTKLKSELRRIFRGQRRVIRRRRQRMNEVRRILHRHGLLSSDNRDALKQPGLDPWKIRAEGIDRLLSPIEFAVALGHIARHRGFKSNSKGAKTSDLDAESSRMKKAVGETREKLARFGSPAKLLVEDEGFVLRQTKLKSGALETVRRFRNRDGDYSRSLLRDDLAAEVRALFRAQARLQSTFAKVELEAEFTQAAFFQRPLQDSERLVGPCPFEPAEKRSPKRGYSFELFRFLSRLNHLTLREGSEERTLTVEELRTAAADFGGVAKFTFSTLRKRLALPDIAIFVGIKADDEKKLDVVARSGEAATGTARLRRVVIDALGELAWGALISAPERLDKITEIITFRSDLDRIRAGLIEAGFDTPLIEAIVRAAADGKLDAFTGVGHISAKAARNIIPGLMRGMTYDKACAAAGYDHTASRERDAFDVGMHGKEALKKILQEERISRELVGSPSARKALIEAVKQVKAIIEKYGVPDRIHVELARDVGKSIEERRDIHFGIEKRSRQKDKLRELFGKEVGHLPQDGERGKEELLRFELWNEQMGRCLYTDEYINPKQLVASDNSVQVDHILPWSRFGDDSYLNKTLCTAKANQDKKGRTPYEWFRADKPEAEWDAFVARVESIQFMKGLKKRNYKLKNAEEAAEKFRSRNLNDTRWTCRLLAEALKQLYPKGEKDKDGKERRRVFTRPGALTNRLRRAWSLQRRKKSEKGERIADDRHHALDAIIVAATTESLLIRATREVQDIERKGLHYDLTKNITQPWPGFADEALDAVEKVFVARAERRRARGKAHDATIRHIAVRDDEAKVYERKKVGDIKLGDLIRVKDAERNAPLIENLRKWIEAGSPRDNPPLSPKGDPVSKVRLVTKNKVNITLDTGNPERLATVDRGEMARVDVFRKANRKGKYEYYLVPIYPHEIATMETPPMRAVQGGGDDDKWPEIDSTFEFLWSINQLSLLELTKPDGEVIRSYFRSLDRNTGALTVSGIANSTATRKGIGTRTLIDFKKLHVDRLGQIFEVERELRTWRGETWRGKDCI

SEQ ID NO: 196 - protein, 1087 aa, Phascolarctobacterium succinatutens
MLRMKYAIGLDIGIASVGYAVLALDHEENPWGIIRLGSRIFDVAENPKDGASLALPRREARSVRRRLRRHHHRLERIKNLLINTEFITKDELLHLYDGNLSDVYELRVKALDYSVTNAELTRILLHLAQRRGFKSNRKSDANDKEAGQLLEAVSANAKRMQENHYRTVGEMFYKDDLFSKYKRNKGGTYLTTVHRDMIAAEARTILEKQFALGNNICTQDFIDKYLSILLSQRQFDEGPGEPSPYAGNQIANMIGKCTFEPNEYRAAKASYSFERFNLLQKVNHLRLLLEGKSIALDNEQRKKIIALAHDKADLRYSHIRKALGLDEKVLFNTITYNDDVSVIEKKTKFNFLQAYHQIKKVLAEDMQKLTTEQLDNIGQILSTYKSDNKRTEELSALGLEKKIIDALLGINGLSKFAHLSLKALRKINPYLEEGKIYNEACTAAGYDFKAHANTQKTELLPAYKEEMDDITSPVARRAIAQSIKVINAIIREQKGSPLYINIELAREMAKGFDERTQIDKANKENQAKNERIMERIRTEFHKANPTGMDLIKLKLWEEQDGRSPYSQKAISINRLFEPGYVDIDHIVPYSISFDDSFKNKVLVFSDENRDKGNRLPIAYLQSKFGAKAAENFMIWVQSNIKDYKKRQKLLKREITEEDINKFKERNLQDTKTISRFLYNYINDYLLFAPSDTGKKKRVTAVNGTITAYLRKRWGINKIRANGDKHHAVDAVVIACTTDKMIKDLSSFSRYHELEYTHTDTESFLVNSLTGEILKRFPYPWEDFRPELMARLSDNPADALRKLNLIFYHGIDLSTIKPIFVSRMPRHKVTGAAHKATIKSARCLDNGIVICKTSLQNLKLDKEGEIANYYAPESDTILYNALKERLRSYDNKPAKAFAEPFYKPKADGTPGPLVKKVKVYEKSTLNVAVQQNTAVADNDSMVRVDVFHVKGNGYYLVPIYIADTLKKELPNKAIVAYKPYADWPVMDDSNFIFSLYPNDLIKFEHKNSVKFAKVNKESTLNDFYSTKSEIVYFKGCNINTGAITIINHENTYVVSSLGVKTLPSLEKYQADVLGNYTKVKKEVRKPFR

SEQ ID NO: 197 - protein, 1375 aa, Lactobacillus ruminis
MRKNQEPYNIGLDIGTSSIGWSIMNDNFDLMRVKGKKGIGVRLYNEGQSAAERRMHRTARRRYGRRKWRLRLLEDFFDEHMAEVDDTFFARLKDSNISPKDDKKYRKSLLFPKSKGVTYQDDGEFYKKYPTMYHLRYALMTEHRKFDLREIYLAFHHMVKYRGNFLYDTSVDSFEAKNLDIKGKFDEINDLLSSYTDFYVDNSNAALVESILLEKNTTRKDKSKKIAKLLHVEDKEKGKNKKAKDLATQISNAVLGLKCNFHLIFELQQKYSFDLCSEKTEENIAKLSEVLDENQKMLLMILKEVQDQVMLNAFVPSGMSLSEAMMQKYDDYGEQLKIYHELEHSVSDDSAAKLRGAYRDYNDNIIKRIDGDNKKDTFYKRVKNILTKISKEYVDQDVLESCGKLKKLIDENKLFIRQRTAANGVLPHQLHQIEMRKIIDNQKEYYPWLAEPNPNEKRRVYSKYKVEELIAFRIPYYVGPLVDPNNADKNKEARFSWMVRKKDGEITPWNFYDKVDWAESANNFIERMKSKDTYLLGEDVVPKESMLYQKYEVLNELNNLRINDSGLSDSFEDVKLKQAIYNDLFKKQKIVKITDLQNYLVQNHKYLVKPKISGLADENRFLSSLSTYSDLKTIFGDKVDDRTYFNDFEKMVEYSTVFEDGHDYNQKLDEYTWLTKEEKYKIGKKRYRGWGKLSKKLLTGLRDKNNHTIMDNLWETNRNFMQIQTADEFSKQIAEENERHLKGSVSDAINDMYTSPANKKAIRQVLRVVDDIQKAMGYAPSSISLEFAREDGPSVRTVSRANRMKSIYEKYASEVSEEVMKDLDGVIKDKKGLNDRLYLYFEQQGKDMYSGHPLDFDKVISGQEYDIDHILPQAVIKDDSLDNRVLTTKALNNDVKSKGVPCRMFNGMHSFWKNLYDKGFISRRKFNNLTTNPENIDKYKMKGFVNRQLVETRQIIKLVANVLNDKYQNDDVDIIEVRAELTHDVRKHFKFYKNRNVNDYHHAFDAYLTSFIGHYLFKKYPNLRPLFDYNDFMKVSDNVFKQLRGNNFLGEFLNKTGDIISTDGNFVLNKEEMINKLNKAYAFKKILVTKEVGQRTGAMFNETRYPAPNSRKAALKYRRMPKPDSLISVKDYKNTDIYGGYSGKNDAYMVIVDMGKQYMVVGVPVRYTEKLDKLRIKHSELYRDELRKVLSRDKTLLDSKGNVKRFDIVLDRVLYGQLIEDGNELFTLGSSKYKRNFRQLFLDKQCIEILDSSATPQPTDEELIWVYDQILDKVDKYFELYDINRQRETLRKGRAAFCSLPNISMKKDDVTKKKILNEILVALHANESESNCEKIGKKVFGRLQVPGGIKLSKEAKLIYQSPTGLFERVVYLKDL

SEQ ID NO: 198 - protein, 1391 aa, Prevotella oralis
MKKILGLDLGTTSIGWALVNEKENNEELSSIIRLGVRVNPLTVDEKSNFEKGKDITTNADRTKCRSARRNLQRFKLRREALADCLKRHGLMTDETPLCETNNSIIFKTYSNRAKAVCEKIALDDFVRVLFMINKKRGYKSSRKLNTDDEGTLVDGMDVAKLLYNEQITPGEYLLRLFKKGKKTRPDFYLSDLKAELERIWDFQRTFYPEILCNALKEDLKGKSRTQSSAIFYAKYKVSTAKIAGKDKRLQELTWRTDALRKQLTIDEVAYVICSINGEVNGSSQRLSMISDRSKLLYFNHQTIGQYLMQRLEENPNAGLKNIIFYRQDYEDEFNDIWNSQATYHKELTPELKKEVKDIIFYQRGLKSCKWLINYCELEHEEIEVKTPEGKLRKITIGSKTCPKSSPLFQEFKIWQVLNNLQVSPLNSRRKAKRKKDEEPSLFSDEDMNTACRYLNEEEKLTLFKELSIKKELKKKDALKLLFENYKELDLNYKVISGNVTMANLYRAFQDIISLTGNGEFDFQAMPAEEAEKTVEEIFGGLGYKTAFLHFDASLHDKEFERQPAYRLWHLLYSYAGDQSKTGIEALVKRIQELCGFEPEYARILANISFIPDYGNLSSKAMRKILPYMQDGYEYSEACSKAGYRHSASSLTKEEINKKNYKTHLDEIKRNSLRNPIVEKILNQMVNVVNSVIDTYSNIDEIRIEMARELKKSKPEREDMSFAISKATKETERIKGILEQEFKIQHVTRNDIIRYRLYEELKPNGYKTLYSNTYIPREDLFSKKFDIEHIIPKARLFDDSYSNKTLELRDINIEKGNQTAYDFVLSKYGEEGLYKYEQRVEEFKKNNEQAGTKCRKLLMREADIPSDFLNRDLNDSQYIAKKAHELLREIVPTVTATTGSITNRLREDWKLVNVMKELNWEKYDKLGLTEEYKDKDGNTVRHIKDWTKRNDHRHHAMDALTIAFTKPSFIQYLNNLNARSNRGGSIYGIEQKELERENNKLVFIPPIDPKIFRKQAKEHLSNILISIKAKNKVVTKNVNKTKSKSGTNRKVQLTPRGQLHLETVYGKIRTYKTEEIKVGTKLTEELIAKVADKKIREALMQRLSEYGGNIKKAFQNISKHPIWLNGSHTKHVPEKVKIVFFEDVFTIRKAITPDIKIDKVIDSKIRRILQERLNEFGGEASKAFSNLDENPIWFNRDKGIAIKSVKIRGIAKGTAIRVKKDIHGKTIIGNNGYPVANDYVNTGNNHHVAIFRDKDGNLQEHIVSFYEATARAIQNLPIVDRNYNSEKDWKFLFSMKQNEYFVFPNPNTGFNPSEISLKDEKNYALISPNLFRVQKLSHYYYVFRHHLETNVDTNLQLKDITWKRITAVNNLTGAVKVRIDHLGRIVDVGEYK

SEQ ID NO: 199 - protein, 1167 aa, Streptococcus sanguinis
MLFGLKTKFKDCFELEEEPDLNFSKENYDDNLEKLLGELGEDFSDVFDKLKILRDTILLSGMLTYTGATHARFSATMVERYEEHRKDLQRFKSFIKQNLSEQDYLDIFGRKTQNGFDVDKETKGYVGYITNKMVLTNPQKQKTIQQNFYDYISGKITGIEGSEYFLNKISDRTFLRKLRTSDNGAIPNQIHAYELEKIIERQGKDYPFLLENKDKLLSILTFKIPYYVGPLAKGNNSRFAWIKRANSSDILDDNDEDTRNGKIRPWNYHKLINMDETRDAFITNLIGNDTILLNEKVLPKRSLIYEEVMLQNELTRVKYKDKYGKAHFFDSEHRQNIINGLFKINSKRVNAERLIKYLSDNHKDLNAIEIVSGVEKGKSFNSTLKTYNDFKTIFSEEFLDSEIYQKELEEIIKVITVFDDKKSIKNYLTKYFGHLEFLDEEKINQLSKLRYTGWGRYSAKLLLDIRDEDTGFNLLQFLRNDEENRNLTNLISDNTLSFDPKIKAIQSKSTVEDDVFDEIKKLAGSPAIKRGILNSIKIVDELVQIIGYPPQNIVIEMARENMTTEEGQKKTKTRKSKLESALKNIENSVLENGKVLHSDEQLQSEKLYLYYLQNGKDIYSLDETGSPAPIYLDQLDQYEVDHIIPYSFLPIDSIDNKVLTHRKNNQRKLDNIPDKETVAHMKPFWEALYNAKLISQTKYQRLTTSERTPDGVLTESMKAGFIERQLVETRQIIKHVARILDNRFSDTKIITLKSQLVTNFRNTFHIAKIRELNDYHHAHDAYLAVVVGQTLLKAYPKLAPELIYGHHVHFNRHEENKATLRKHLYSNIMRFFNNPDSKVSKDIWDCNRDLPIIKHVIYNSQINFVKRTMIKKGAFYNQNPVGKFNKQLAANNRYPLKTKALCLDTSIYGGYGPMNSTLSIIIIAERFNEKKGKIETVKEFHDIFIIDYEKFNNNPFQFLNDTSENGFLKKNNINRVLGFYRIPKYSLMQKIDGTRMLFESKLNLHKATQFKLTKTQNELFFHMKRLLTNSNLMDLKSESAIKESQNFILKHKEEFDNISNQLSAFSQKMLGNTTSLKNLIKGYNERKIKEIDIREETIKYFYDNFIKMFSFVKSGAPKDINDFFDNKYTVARMRPKPDKRLLNATLIHQSITGLYETRIDLSKLGED

SEQ ID NO: 200 - protein, 1334 aa, Staphylococcus pseudintermedius
MGRKPYILSLDIGTGSVGYACMDKGFNVLKYHDKDALGVYLFDGALTAQERRQFRTSRRRKNRRIKRLGLLQELLAPLVQNPNFYQFQRQFAWKNDNMDFKNKSLSEVLSFLGYESKKYPTIYHLQEALLLKDEKFDPELIYMALYHLVKYRGHFLFDHLKIENLTNNDNMHDFVELIETYENLNNIKLNLDYEKTKVIYEILKDNEMTKNDRAKRVKNMEKKLEQFSIMLLGLKFNEGKLFNHADNAEELKGANQSHTFADNYEENLTPFLTVEQSEFIERANKIYLSLTLQDILKGKKSMAMSKVAAYDKFRNELKQVKDIVYKADSTRTQFKKIFVSSKKSLKQYDATPNDQTFSSLCLFDQYLIRPKKQYSLLIKELKKIIPQDSELYFEAENDTLLKVLNTTDNASIPMQINLYEAETILRNQQKYHAEITDEMIEKVLSLIQFRIPYYVGPLVNDHTASKFGWMERKSNESIKPWNFDEVVDRSKSATQFIRRMTNKCSYLINEDVLPKNSLLYQEMEVLNELNATQIRLQTDPKNRKYRMMPQIKLFAVEHIFKKYKTVSHSKFLEIMLNSNHRENFMNHGEKLSIFGTQDDKKFASKLSSYQDMTKIFGDIEGKRAQIEEIIQWITIFEDKKILVQKLKECYPELTSKQINQLKKLNYSGWGRLSEKLLTHAYQGHSIIELLRHSDENFMEILTNDVYGFQNFIKEENQVQSNKIQHQDIANLTTSPALKKGIWSTIKLVRELTSIFGEPEKIIMEFATEDQQKGKKQKSRKQLWDDNIKKNKLKSVDEYKYIIDVANKLNNEQLQQEKLWLYLSQNGKCMYSGQSIDLDALLSPNATKHYEVDHIFPRSFIKDDSIDNKVLVIKKMNQTKGDQVPLQFIQQPYERIAYWKSLNKAGLISDSKLHKLMKPEFTAMDKEGFIQRQLVETRQISVHVRDFLKEEYPNTKVIPMKAKMVSEFRKKFDIPKIRQMNDAHHAIDAYLNGVVYHGAQLAYPNVDLFDFNFKWEKVREKWKALGEFNTKQKSRELFFFKKLEKMEVSQGERLISKIKLDMNHFKINYSRKLANIPQQFYNQTAVSPKTAELKYESNKSNEVVYKGLTPYQTYVVAIKSVNKKGKEKMEYQMIDHYVFDFYKFQNGNEKELALYLAQRENKDEVLDAQIVYSLNKGDLLYINNHPCYFVSRKEVINAKQFELTVEQQLSLYNVMNNKETNVEKLLIEYDFIAEKVINEYHHYLNSKLKEKRVRTFFSESNQTHEDFIKALDELFKVVTASATRSDKIGSRKNSMTHRAFLGKGKDVKIAYTSISGLKTTKPKSLFKLAESRNEL

SEQ ID NO: 201 - protein, 1156 aa, Ruminococcus albus
MGNYYLGLDVGIGSIGWAVINIEKKRIEDFNVRIFKSGEIQEKNRNSRASQQCRRSRGLRRLYRRKSHRKLRLKNYLSIIGLTTSEKIDYYYETADNNVIQLRNKGLSEKLTPEEIAACLIHICNNRGYKDFYEVNVEDIEDPDERNEYKEEHDSIVLISNLMNEGGYCTPAEMICNCREFDEPNSVYRKFHNSAASKNHYLITRHMLVKEVDLILENQSKYYGILDDKTIAKIKDIIFAQRDFEIGPGKNERFRRFTGYLDSIGKCQFFKDQERGSRFTVIADIYAFVNVLSQYTYTNNRGESVFDTSFANDLINSALKNGSMDKRELKAIAKSYHIDISDKNSDTSLTKCFKYIKVVKPLFEKYGYDWDKLIENYTDTDNNVLNRIGIVLSQAQTPKRRREKLKALNIGLDDGLINELTKLKLSGTANVSYKYMQGSIEAFCEGDLYGKYQAKFNKEIPDIDENAKPQKLPPFKNEDDCEFFKNPVVFRSINETRKLINAIIDKYGYPAAVNIETADELNKTFEDRAIDTKRNNDNQKENDRIVKEIIECIKCDEVHARHLIEKYKLWEAQEGKCLYSGETITKEDMLRDKDKLFEVDHIVPYSLILDNTINNKALVYAEENQKKGQRTPLMYMNEAQAADYRVRVNTMFKSKKCSKKKYQYLMLPDLNDQELLGGWRSRNLNDTRYICKYLVNYLRKNLRFDRSYESSDEDDLKIRDHYRVFPVKSRFTSMFRRWWLNEKTWGRYDKAELKKLTYLDHAADAIIIANCRPEYVVLAGEKLKLNKMYHQAGKRITPEYEQSKKACIDNLYKLFRMDRRTAEKLLSGHGRLTPIIPNLSEEVDKRLWDKNIYEQFWKDDKDKKSCEELYRENVASLYKGDPKFASSLSMPVISLKPDHKYRGTITGEEAIRVKEIDGKLIKLKRKSISEITAESINSIYTDDKILIDSLKTIFEQADYKDVGDYLKKTNQHFFTTSSGKRVNKVTVIEKVPSRWLRKEIDDNNFSLLNDSSYYCIELYKDSKGDNNLQGIAMSDIVHDRKTKKLYLKPDFNYPDDYYTHVMYIFPGDYLRIKSTSKKSGEQLKFEGYFISVKNVNENSFRFISDNKPCAKDKRVSITKKDIVIKLAVDLMGKVQGENNGKGISCGEPLSLLKEKN

SEQ ID NO: 202 - protein, 1440 aa, Weeksella virosa
MKTILGLDLGTNSIGWALVEQDFENKQGLILGMGSRIIPMDAGIIGKFAEGSSISQTAERTGYRSIRRLRERHLLRRERLHRVLNILKFLPEHYAAEIDFEKRFGQFLAETEPKLAWKKNAEGKFEFLFQRSFDEMVADFKANGQDIKIPYDWTIYYLRKKALTQKISPQELAWIILNFNQKRGYYQLRGEEEEENPNKKVEFYSLKIVDVVADEQPNKKGDTWYSLHLENGWVYRRSSKIPLYDWKDKVRDFIVTTDINEDGSEKLDKDGEVKRSFRAPKEDDWTLIKKKTEQEIEQFNQTVGSYIYEALLDNPTQKIRGKLVRTIERKFYKSELKKILEKQIELQPELFTEDLYNACARELYRRNVAHQQQLSSRDFVYLFLNDIIFYQRPLRSQKSLISNCSLEFRTIKDKDGNGQIIYLKAIPKSNPYYQEFRVWQWLYNLKIFTKEDDKDVTNQFINKVEDLEALFEFLMNQKEVNHTDILTYLIEPIVKSKYPNAKGKAFKDELKKELKKYRWNYVYDADKDESKSYPMNETRYELRKRLDKVENVPADFMTRKIEQHLWHIIYSVTDKIEFEKALKSFANKYDLHQESFVENFKRFKPFDSDYGTYSEKAIKKLLPLMRVGKYWSWDIIDDKTKTRIGKIITGEYDETIKNRVREKAIDLTEENHFQGLQLWLAQYIVYDRHSEADIAGKWNSVADLEQYLSEFKQHSLRNPIVEQVITETLRVVRDIWKQYGKGAKDYFDEIHIELGREMKNTAEERKRLSSIISENETTNLRIRAILEELMYDENMENVRPYSPMQQEALKIYEDGVLSSSVEIPEDIEKISKKSEPTKSEIQRYKLWLEQKYRSPYTGRPIPLSKLFTPAYQIEHIIPQARFFDDGFSNKVICESEVNALKDKMLGLEFIQNYYGQKVTTSFGEVTILTEDAYKAFVKEHYDKNRSKRNKLLLEEIPEKMIDRQMNDTRYISKYISKVLSNLVRGEKDDEGVNSKNIIPGNGKITGILKQDWGLNDVWNDLILPRFERMNQLTNSTDFTAWNEKHQKFLPSVPLELSKGFQKKRIDHRHHALDALIIACATRDHVNLLNNKHAKSRNERYDLQHKLRHTTPWQDKEGKVRTKFTEFKKPWETFTQDTKKELEKIVVNFKQNLRVINKATNYYEKIVDGKKVMFKQEGVNWAIRKPMHKETVSGKIDLPRVKVSKGKILTATRKSLDTSFNAKTILSITDTGIQKILLNYLKAKGNPELAFSPEGIEEMNQNISLYNDGKPHQPILKVRVFEQGSKFPLGETGNKTTKYVEAAKGTNLFFGVYEDNQGKRSYDTIPLNIVIERQKQGLNSVPETNEKGHRLLFSLSPNDLVYVPIEGEVFDETNPDVNRIYKVVSFSGSQMFCVRQDVATSIVYKLEFSSLNKMERTIDGIMIKEICIKLKVDRLGNISKA

SEQ ID NO: 203 - protein, 1179 aa, Sphaerochaeta globus
MSKKVSRRYEEQAQEICQRLGSRPYSIGLDLGVGSIGVAVAAYDPIKKQPSDLVFVSSRIFIPSTGAAERRQKRGQRNSLRHRANRLKFLWKLLAERNLMLSYSEQDVPDPARLRFEDAVVRANPYELRLKGLNEQLTLSELGYALYHIANHRGSSSVRTFLDEEKSSDDKKLEEQQAMTEQLAKEKGISTFIEVLTAFNTNGLIGYRNSESVKSKGVPVPTRDIISNEIDVLLQTQKQFYQEILSDEYCDRIVSAILFENEKIVPEAGCCPYFPDEKKLPRCHFLNEERRLWEAINNARIKMPMQEGAAKRYQSASFSDEQRHILFHIARSGTDITPKLVQKEFPALKTSIIVLQGKEKAIQKIAGFRFRRLEEKSFWKRLSEEQKDDFFSAWTNTPDDKRLSKYLMKHLLLTENEVVDALKTVSLIGDYGPIGKTATQLLMKHLEDGLTYTEALERGMETGEFQELSVWEQQSLLPYYGQILTGSTQALMGKYWHSAFKEKRDSEGFFKPNTNSDEEKYGRIANPVVHQTLNELRKLMNELITILGAKPQEITVELARELKVGAEKREDIIKQQTKQEKEAVLAYSKYCEPNNLDKRYIERFRLLEDQAFVCPYCLEHISVADIAAGRADVDHIFPRDDTADNSYGNKVVAHRQCNDIKGKRTPYAAFSNTSAWGPIMHYLDETPGMWRKRRKFETNEEEYAKYLQSKGFVSRFESDNSYIAKAAKEYLRCLFNPNNVTAVGSLKGMETSILRKAWNLQGIDDLLGSRHWSKDADTSPTMRKNRDDNRHHGLDAIVALYCSRSLVQMINTMSEQGKRAVEIEAMIPIPGYASEPNLSFEAQRELFRKKILEFMDLHAFVSMKTDNDANGALLKDTVYSILGADTQGEDLVFVVKKKIKDIGVKIGDYEEVASAIRGRITDKQPKWYPMEMKDKIEQLQSKNEAALQKYKESLVQAAAVLEESNRKLIESGKKPIQLSEKTISKKALELVGGYYYLISNNKRTKTFVVKEPSNEVKGFAFDTGSNLCLDFYHDAQGKLCGEIIRKIQAMNPSYKPAYMKQGYSLYVRLYQGDVCELRASDLTEAESNLAKTTHVRLPNAKPGRTFVIIITFTEMGSGYQIYFSNLAKSKKGQDTSFTLTTIKNYDVRKVQLSSAGLVRYVSPLLVDKIEKDEVALCGE

SEQ ID NO: 204 - protein, 1370 aa, Streptococcus gallolyticus
MTKKNYSIGLDIGTNSVGWAVITDDYKVPAKKMKVLGNTDKKYIKKNLLGALLFDSGETAEATRLKRTARRRYTRRKNRLRYLQEIFAEEMTKVDESFFYRLDESFLTTDEKDFERHPIFGNKAEEDAYHQKFPTIYHLRNYLADSSEKADLRLVYLALAHMIKYRGHFLIEGKLNAENTDVQKLFTDFVGVYDRTFDDSHLSEITVDVASTLTEKISKSRRLENLIKYYPTEKKNTLFGNLIALALGLQPNFKMNFKLSEDAKLQFSKDTYEEDLEELLGKIGDDYADLFTSAKNLYDAILLSGILTVDDNSTKAPLSASMIKRYVEHHEDLEKLKEFIKANKSELYHDIFKDKNKNGYAGYIENGVKQDEFYKYLKNTLSKIDGSDYFLDKIEREDFLRKQRTFDNGSIPHQIHLQEMHAILRRQGDYYPFLKEKQDRIEKILTFRIPYYVGPLVRKDSRFAWAEYRSDEKITPWNFDKVIDKEKSAEKFITRMTLNDLYLPEEKVLPKHSHVYETYAVYNELTKIKYVNEQGKESFFDSNMKQEIFDHVFKENRKVTKEKLLNYLNKEFPEYRIKDLIGLDKENKSFNASLGTYHDLKKILDKAFLDDKVNEEVIEDIIKTLTLFEDKDMIHERLQKYSDIFTANQLKKLERRHYTGWGRLSYKLINGIRNKENNKTILDYLIDDGSANRNFMQLINDDTLPFKQIIQKSQVVGDVDDIEAVVHDLPGSPAIKKGILQSVKIVDELVKVMGDNPDNIVIEMARENQTTNRGRSQSQQRLKKLQSSLKELGSNILNEEKPSYIEDKVENSHLQNDQLFLYYIQNGKDMYTGDELDIDHLSDYDIDHIIPQAFIKDDSIDNRVLTSSAKNRGKSDDVPSLDIVRARKAEWVRLYKSGLISKRKFDNLTKAERGGLTEADKAGFIKRQLVETRQITKHVAQILDARFNTEHDENDKVIRDVKVITLKSNLVSQFRKDFEFYKVREINDYHHAHDAYLNAVVGTALLKKYPKLASEFVYGEYKKYDIRKFITNSSDKATAKYFFYSNLMNFFKTKVKYADGTVFERPIIETNADGEIAWNKQIDFEKVRKVLSYPQVNIVKKVETQTGGFSKESILPKGDSDKLIPRKTKKVYWDTKKYGGFDSPTVAYSVFVVADVEKGKAKKLKTVKELVGISIMERSFFEENPVEFLENKGYHNIREDKLIKLPKYSLFEFEGGRRRLLASASELQKGNEMVLPGYLVELLYHAHRADNFNSTEYLNYVSEHKKEFEKVLSCVEDFANLYVDVEKNLSKIRAVADSMDNFSIEEISNSFINLLTLTALGAPADFNFLGEKIPRKRYTSTKECLTATLIHQSITGLYETRIDLSKLGEE

SEQ ID NO: 205 - protein, 1044 aa, Nitrosomonas sp.
MLHKMRYRLALDLGSTSLGWAMVRLNANQQPCAVIKAGVRIFSNGRNPKDGSSLAVTRREARSMRRRRDRLLKRKARMMRTLIEYGFFPANETQRKALENLNPYALRAKGLDEALTPSEFARALFHINQRRGFKSNRKTDKKDSDSGALKTAIKQLHSVLDPQGNDGKPRTVGELLYKRFTDLSKLPKDRTVRARYRQDKIVKDDGKTKIDKYYDLYIDRAMIEQEFDALWKKQSELNPILFTENARADLKDVLLYQRSLKPVKPGRCTFMSEEERAPLALPSTQRFRMYQEVNNLRILREGLKEESLTLQQRDDLINALEKNNRRTFTQIKKLLGVGGSVQFNFEDPKREELKGNTTSAILGKSEHFGEAWFAFNEAKQDAIVLQLIKEENEAKLVRWLQDETGIDEKRAEVIANAGLPEGYGSLCIEALARILPELRRDVVTYDKAVQAAGFEHHSKLNRNEEIPDITFKIESIDRNSGEIKQFHLHKELPYYGEYLQRHVGFGSGKPEDSIEKRYGKIANPTVHIGLNQVRVVVNALIKRYGHPSEIIVEVARDLKQSKDRRDEENKRQAENQKRNERLRKDIADILGISEERVRRDDIEKMILWEELSFDPADRRCPYSGVQVSTVMLLSDEVEVEHILPFSQTLDDSLNNKTVALRQANRIKGNRTPWEAFGTSNISGFDYSGILTRAELMPKAKRYRFAEDGYQRWLKDDAGFLARALNDTRHLSKIAREYMSLICPNTRVIPGQMTAMLRRNFGLNDVLGLNGEKNRNDHRHHAVDACVIAVTDQGLLQRFAAASASARERQLNRLVENMPLPWESYREHVRRAIDGIWVSHRPDHSHEGAMHNDTAYGLRGNGRVSFHKMVEGKREYIEDNLKVIEITDTKAIDRHGLLPTGKPRPYKGYKGDSNYCIEIVRNEKGRWEGEIISTFDAYQLVRKYGIVQLRYPVLSVSGKPLVMRLIRNDFVRLEHEGITRTLRVCKMREDGQVALADVTEANVDARTRTKEICYVFKTGGSLQKAKARRITISPIGELRDPGFKE

SEQ ID NO: 206 - protein, 1045 aa, Acidovorax avenae
MQKEKPLAYRLALDLGSTSLGWAVLRLSAPGEPSAVIRAGSRIFSDGRNPKDGSSLAVTRRAARAMRRRRDRLLKRKARMLAALERHGFFPQDEAARKALEKLNPYGLRARGLESALKPEEFGRALFHLNQRRGFQSNRKTDRKDSDSGALKQAIGTLRAQMHESGCRTVGEWFWKVRMERKPEGVKGQGVRARYRETPFTTDEGKKRIDKRYDLYVDRAMVAQEFDALWAAQATFAPALFNEAARAELRDILLHQRKLRPVQPGRCTLVPEEPRALLALPSTQRFRIYQEVNHLRVLHDELREEALTLAQRDQIVALLERQAKVTFTAMRKALGFSALFNLEDAKRDGLKGNATTAALGKKDLFGPLWAGFDTALQDEIVTQLMTEESEPRLIAWLQEHTGVDEARAQAIANAGLPEGYGSLGRTALARIVPELQRDVITYDKAVQAAGFAHHSDLGFSFEHDADEVERIGERTIASTGEIKPVFAFKQLPYYGRALQRHVAFAKENPRNDEERYGKIANPTVHIGLNQVRVVVNALMCRYGRPTEVVIELARDLKQSREQKLEAQQRQADNQKRNARIRRSIAEVLGISEERVRTLDIQKWILWEELSHDAADRRCPYSGVQISASMLLGERVEIEHILPFSMTLDDSLNNRTVALREANRIKRNRTPWDARTDFEAHGWSYDGILQRAERMPQRKRHRFAPDGYERWLGEDKDFLARALNDTRYLSRVAAEYLRLVCPGSATRVIPGQMTALLRGKFGLNDVLGLDGEKNRNDHRHHAVDACVIGVTDQRMMQRFAQANAQAREDGLTRLVEDMPLPWPTYRAHVERAVRHIWVSHKPDHGFEGAMMEETSYGILRDGTIKQRRKADGSAGREISRLIRITEPSQPQRHGVDAEGRPLPYKGYVGGSNYCLEITVNDKGKWEGQVISTFDAYRIVREGGLRQLRHSTQGQNGQALAMRLVIGDSVRLEVDEQERVMRIVKINGNNGQVFMAPVHEANVDARNSDKNEAFAYTSKIAGSFQKTKARQVTISPIGELRDPGFKG

SEQ ID NO: 207 - protein, 1218 aa, Prevotella denticola
MKASEEKLSKGLSTYMKENNLLTVGAAFAQLEDEGVRIRNNNNYRAIRSQFQHEIETIFMFQQGLSENELYERLVSEKKNIGTIFYKRPLRSQRGNVGKCTLERTKPRCAIGHPLFEKFRAWTLINNIKIRMSEEEQAEQLPMKLRFELYNDCFLAFVRAEFKFEDIRKYLEKRLGVHFSYNDKTINYKDSTSVAGCPITARFRKLLGEDWESFHVDGQKQRQAHGKNNASFHTVSYSTNDIWHFCYDAEEPEAVLSFAQDNLKWEKKKAEELVRIWSAIPQGYAMLSQKAIRNINKMLILGLKYSDAVLLAKVPEIVEITDGEILSVTEDYHRVEAQVGYEKQINNIVNALIAKYKSASEEYRFADHNYEYQLDKSDEKDIIKQIESNIGTRKWSLLDADEQTDILQKVRDKYQNFFRSHERKFVESPKLGECFEEYLMKKFPMVEGEQWKKLYHPSQIAIYRPVSAGKDRSALRLGNPDIGAIKNPTVLRVLNTLRKRVNQLLDDGLISPDETRVVVETARELNDANRKWALDNYNRIRHDENEKIKKILEEFYPKRDGISTDDIDKARYVIDQREMDYFTEEKPYNKDIKKYKLWLEQGGQCMYTGRTINLSNLFDPNSFDVEHTIPESISFDSSDMNLTLCDAHYNRFIKKNHIPADLPNYDKSVVIDGKEYSPIKPRLQRWADRVERLNRNVEYWRGQARRAQNKDRKDQCMREMHLWKMELEYWTKKLERFTITEVTDEFKNSQLVDTRVITRHAVLYLKSIFPHVDVQRGDVTAKFRKILGIQSVDEKKDRSLHSHHAIDATTLTIIPGAAKRERMLELFAKIEEVNKMLSFSGNEDRTGLKQELDGLKNQLNKEVKACRIGHNVSEIGTFINDNIIINHHVKNQALTPVRRRLRKRGHIVGGMDNPRWQTGDALRGEIHKASYYGAITQFAKDKDGKVLLKEGHPLVDPTIKFVIRRELKYKKSTADSGFASWDDLEKAIVDKELFALMKGQFPEETSFKDACEQGIYMIKKGKNGEVDTKLYRIRHIRCKTKQKNALKIKEQAYKSEKEYKRYFYAAVGDLYAMCCYTNGKTREFKIYSLYDISCHRKVGVEDIPEFITDKKGNRLMLDYKLHTGDMILLYKENPEELYDLDNVSLSKLLYKINGFENDGLRIRMVNHLVAKEAMGESVKDYAKLPDIIRCGVKTIKFLVMGENRDFVIKNGKISFNHR

SEQ ID NO: 208 - protein, 1458 aa, Fluviicola taffensis
MTKTILGLDLGTNSIGWALINQDFDNKKGEILGMGSRIIPMTQDIKDEFGKGNSISQTAERTRLRGVRRLIHRTLLRRERLHRVLNIIGFLPEHYANQIDFEKRFGKFKPESEPKISFDGNDVFLFEKSYQEMLVDFKIHQPQLVSNGKKIPHDWTIYYLRKKALSKKIEKEELAWILLNFNQKRGYYQLRGEEEEETPNKLVEFHSLKIVEVNADEPQKGKPEIWYSLVLENGWVYRRASKTPLFDWKDKIREFIVTTEINNDGTVKTDKEGTEKRSFRAPKPEDWTLQKKKTEFELSKSGNEVGAFIYESILQKPNQKIRGKLISTIERKFYKEELKTILKTQLFFHKELKDEKLYNACIEELYKNNEAHRSLLSNKGFEHLFINDILFYQRPLRSKKSQISNCPLEKRTYKKEGIEITEGIKVISKSNPIYQEFRLWQWISNLSLYCIEPTETNVTSTFLNSIEDYENLFEFLNNRKEIEQKHLLKYLLENQGFKGKLLTNELEKFRWNFVADKKYPCNETGSLLHTRLSKVKNISPDFLTKEIEHQLWHIIYSVTDKIEYEQALKTFARKNNLDVDSFFEHFKKIPPFESTYGAYSEKAIKKLLPLIRLGKYWNWEAIDSISKDRISKILSGEYDENIKNRVREKAVHLTSENNFQGLQEWLAKYIVYDRHSEGNDLGKWTSVSDLETYLKEFKQHSLRNPIVEQVITETLRVVKDIWIKHGKGTENFFDEIHVELGREMKNNSEDRKRLTNTITENENTNLRIKALLMEMMNDNDVENVRPYSPSQQEILKIYEDGALNSNIELDDEIVKISKKAEPTKSELQRYKLWLEQKYRSPYTGQVIPLNKLFTSEYEIEHVVPQSRFFDDSFSNKVICESAVNKRKDNQLGLQFIKNHSGEKVELGFGKVVQVFTEEQYLDFVKEHYSKNRSKHNKLLLEEIPEKMIERQLNDTRYISKFVSSILSNIVRSEKDDDGLNSKNILPGNGKITTELKRDWGLNDVWNDLILPRFERMNTITNSDLFTTYNDKYQKHLPTVPFEYSKGFQKKRIDHRHHAMDALVIACATRDHLNLMNNQSAKSELKRYDLQNKLRKKEPYFNQKENKQKEAFKDFIKPWGTFTEDSKNALEKIIISFKQNLRVINKATNSYESYKDEDGNLRIGKDGKPEKGLIKQKGLNWAIRKPLHKDTVSGQINLSRIKLPNGKILTATRKNLDTSFDLKTIENSITDTGIQKILKNYLLSKESPELAFSPEGLEEMNNEIEKYNNGKFHHPINKARIYELGSKFNVGQTGNRRDKFVEAAKGTNLFFAIYQDENKNRSYETIPLNEVIEHQKWRASLPKEEQEKIPLVPVNKLKGTFIFSLSPNDLVYVPSNDELERSASIDFSKLKKEQINRLYKMVSSSGSQCFFVKSEVATSVVNKMEYSSLNKMEKSIDNLMVKEICIKLKIDRLGNISKA

SEQ ID NO: 209 - protein, 1384 aa, Coriobacterium glomerans
MKLRGIEDDYSIGLDMGTSSVGWAVTDERGTLAHFKRKPTWGSRLFREAQTAAVARMPRGQRRRYVRRRWRLDLLQKLFEQQMEQADPDFFIRLRQSRLLRDDRAEEHADYRWPLFNDCKFTERDYYQRFPTIYHVRSWLMETDEQADIRLIYLALHNIVKHRGNFLREGQSLSAKSARPDEALNHLRETLRVWSSERGFECSIADNGSILAMLTHPDLSPSDRRKKIAPLFDVKSDDAAADKKLGIALAGAVIGLKTEFKNIFGDFPCEDSSIYLSNDEAVDAVRSACPDDCAELFDRLCEVYSAYVLQGLLSYAPGQTISANMVEKYRRYGEDLALLKKLVKIYAPDQYRMFFSGATYPGTGIYDAAQARGYTKYNLGPKKSEYKPSESMQYDDFRKAVEKLFAKTDARADERYRMMMDRFDKQQFLRRLKTSDNGSIYHQLHLEELKAIVENQGRFYPFLKRDADKLVSLVSFRIPYYVGPLSTRNARTDQHGENRFAWSERKPGMQDEPIFPWNWESIIDRSKSAEKFILRMTGMCTYLQQEPVLPKSSLLYEEFCVLNELNGAHWSIDGDDEHRFDAADREGIIEELFRRKRTVSYGDVAGWMERERNQIGAHVCGGQGEKGFESKLGSYIFFCKDVFKVERLEQSDYPMIERIILWNTLFEDRKILSQRLKEEYGSRLSAEQIKTICKKRFTGWGRLSEKFLTGITVQVDEDSVSIMDVLREGCPVSGKRGRAMVMMEILRDEELGFQKKVDDFNRAFFAENAQALGVNELPGSPAVRRSLNQSIRIVDEIASIAGKAPANIFIEVTRDEDPKKKGRRTKRRYNDLKDALEAFKKEDPELWRELCETAPNDMDERLSLYFMQRGKCLYSGRAIDIHQLSNAGIYEVDHIIPRTYVKDDSLENKALVYREENQRKTDMLLIDPEIRRRMSGYWRMLHEAKLIGDKKFRNLLRSRIDDKALKGFIARQLVETGQMVKLVRSLLEARYPETNIISVKASISHDLRTAAELVKCREANDFHHAHDAFLACRVGLFIQKRHPCVYENPIGLSQVVRNYVRQQADIFKRCRTIPGSSGFIVNSFMTSGFDKETGEIFKDDWDAEAEVEGIRRSLNFRQCFISRMPFEDHGVFWDATIYSPRAKKTAALPLKQGLNPSRYGSFSREQFAYFFIYKARNPRKEQTLFEFAQVPVRLSAQIRQDENALERYARELAKDQGLEFIRIERSKILKNQLIEIDGDRLCITGKEEVRNACELAFAQDEMRVIRMLVSEKPVSRECVISLFNRILLHGDQASRRLSKQLKLALLSEAFSEASDNVQRNVVLGLIAIFNGSTNMVNLSDIGGSKFAGNVRIKYKKELASPKVNVHLIDQSVTGMFERRTKIGL

SEQ ID NO: 210 - protein, 1077 aa, Neisseria bacilliformis
MQQKPQRYILGLDLGIASVGWACVWADENEHPTGLLDCGVRTFERAEVPKTGDSLALARRQARSVRRLIRRRAHRLLRLRRLLKREGVLLSADFNENGLVRGLPIDAWALRVAGLDRKLSNKEWAAVLLHLVKHRGYLSQRKNETQSKDKELGRLLAGVNGNREALQNRSDEYRTAAELAVKKFAAENNGSLRNKGGDYSHTFDRKDLQRELHLLFERQRALDNPFTSSEMEAAVDELLMKQRSALQGEAVLKMLGRCTFEPSEYKAAKNTYSAERFVWLTKLNNLRIQYNGEERALSEAERRLLLDEPYQKAKLTYKQVRTILELPESAVFKGLRYGHGEDGLKAESGTLMEMKAYHAVRKALKDAGLEGEWENRIRNPELLDAIGTAFSLYKTDEDIRANLAAFRLSENVLEALLAGLNFDKFVHLSLKALAKILPLMEQGMRYDEACKEAYGDHYGAKEQEDHRLLPPFVADDIRNPVVFRTLTQARKIVNEIVRRYGSPLRVHIETGREVGKSFSDRKEIEKRQEENRKERERAAAHFKELFPNFAGEPKAQDILKLRLYEQQHGKCLYSGKEIDLRRLPEKGYVEIDHALPFSRTWDDSFNNKVLVLGKENQDKRNRTPYEYLDGKGNSGAWRAFAERVSGCRFPYAKKQRLLTQKLDEKTEQGFLERNLNDTRYVARFLCQFIEEKMHLEGAGKKRVFASNGQITALLRGFWGLKKVREENDRHHALDAVVVACSSVSMQQKITRHFRYREELEHIDRETGEVIHGFPQPWEFFRQEVMTRVFSDDPVSELAEKLDSRPEAVHEFVTPLFVSRAPHRKVTGQGHLETIRSAKRLDEKISVVKLPLTQLKTKDIERIVGYPNREPALYDALAARLAAFKDDPAKAFSEPFYKTGKDGKCGVLVKAVRVENVQKSGLLVRKDESGKMQGVADNATMVRVDVFGKNGKNYLVPVYAWQVEKGELPNRAVVAYADEEDWDEMDDSFEFKFSLYPNDLVEVVTKKDKFFGYYSGFNRATGAINIKEHDLSKSKVKNGVYEGIGVKTAQSFQKYQVDTLGKTIRLCKPEKRMGFKKK

SEQ ID NO: 211 - protein, 1029 aa, Alicycliphilus denitrificans; identical to SEQ ID NO: 188

SEQ ID NO: 212 - protein, 1122 aa, Streptococcus suis; identical to SEQ ID NO: 82

SEQ ID NO: 213 - protein, 1428 aa, Parasutterella excrementihominis
MGKTHIIGVGLDLGGTYTGTFITSHPSDEAEHRDHSSAFTVVNSEKLSFSSKSRTAVRHRVRSYKGFDLRRRLLLLVAEYQLLQKKQTLAPEERENLRIALSGYLKRRGYARTEAETDTSVLESLDPSVFSSAPSFTNFFNDSEPLNIQWEAIANSPETTKALNKELSGQKEADFKKYIKTSFPEYSAKEILANYVEGRRAILDASKYIANLQSLGHKHRSKYLSDILQDMKRDSRITRLSEAFGSTDNLWRIIGNISNLQERAVRWYFNDAKFEQGQEQLDAVKLKNVLVRALKYLRSDDKEWSASQKQIIQSLEQSGDVLDVLAGLDPDRTIPPYEDQNNRRPPEDQTLYLNPKALSSEYGEKWKSWANKFAGAYPLLTEDLTEILKNTDRKSRIKIRSDVLPDSDYRLAYILQRAFDRSIALDECSIRRTAEDFENGVVIKNEKLEDVLSGHQLEEFLEFANRYYQETAKAKNGLWFPENALLERADLHPPMKNKILNVIVGQALGVSPAEGTDFIEEIWNSKVKGRSTVRSICNAIENERKTYGPYFSEDYKFVKTALKEGKTEKELSKKFAAVIKVLKMVSEVVPFIGKELRLSDEAQSKFDNLYSLAQLYNLIETERNGFSKVSLAAHLENAWRMTMTDGSAQCCRLPADCVRPFDGFIRKAIDRNSWEVAKRIAEEVKKSVDFTNGTVKIPVAIEANSFNFTASLTDLKYIQLKEQKLKKKLEDIQRNEENQEKRWLSKEERIRADSHGICAYTGRPLDDVGEIDHIIPRSLTLKKSESIYNSEVNLIFVSAQGNQEKKNNIYLLSNLAKNYLAAVFGTSDLSQITNEIESTVLQLKAAGRLGYFDLLSEKERACARHALFLNSDSEARRAVIDVLGSRRKASVNGTQAWFVRSIFSKVRQALAAWTQETGNELIFDAISVPAADSSEMRKRFAEYRPEFRKPKVQPVASHSIDAMCIYLAACSDPFKTKRMGSQLAIYEPINFDNLFTGSCQVIQNTPRNFSDKTNIANSPIFKETIYAERFLDIIVSRGEIFIGYPSNMPFEEKPNRISIGGKDPFSILSVLGAYLDKAPSSEKEKLTIYRVVKNKAFELFSKVAGSKFTAEEDKAAKILEALHFVTVKQDVAATVSDLIKSKKELSKDSIENLAKQKGCLKKVEYSSKEFKFKGSLIIPAAVEWGKVLWNVFKENTAEELKDENALRKALEAAWPSSFGTRNLHSKAKRVFSLPVVATQSGAVRIRRKTAFGDFVYQSQDTNNLYSSFPVKNGKLDWSSPIIHPALQNRNLTAYGYRFVDHDRSISMSEFREVYNKDDLMRIELAQGTSSRRYLRVEMPGEKFLAWFGENSISLGSSFKFSVSEVFDNKIYTENAEFTKFLPKPREDNKHNGTIFFELVGPRVIFNYIVGGAASSLKEIFSEAGKERS

SEQ ID NO: 214 - protein, 1371 aa, Lactobacillus buchneri
MKVNNYHIGLDIGTSSIGWVAIGEDGKPLRIKGKTAIGARLFQEGNPAADRRMFRTTRRRLSRRKWRLKLLEEIFDPYITPVDSTFFARLKQSNLSPKDSRKEFKGSMLFPDLTDMQYHKDYPTIYHLRHALMTQDEKFDIRMVYLAIHHIVKYRGNFLNSTPVDSFKASKVNFVDQFKKLNELYTAINPEESFQINLANSEDIGHQFLDPSIRKFDKKKQIPKIVPVSVDDKATDKINGKIASEIINAILGYKSKLDVVVQCTPVDSKSWALKFDEEDIDAKLQKILPEMDENQQSIIAILQNLYSQVTLNQIVPNGMSLSESMIEKYNDHHDHLKLYKKIIDQLADPKKKAALKKAYSQYVGDDGKVIEQADFWSSVKKNLDDSDLSKQIMDLIDAEKFMPKQRTSQNGVIPHQLHQRELDEIIEHQSKYYPWLAEINPNKHDLHLAKYKIEELVAFRVPYYVGPMITPDDQAKSAETVFSWMERKGKEAGQITPWNFDEKVDRNASANRFIKRMTTKDTYLIGEDVLPDESLLYEKFKVLNELNMVRVNGKLLKVADKQAIFQDLFENYKHISVKKLQNYIKSKTGLPSDPEISGLSDPEYFNNSLGTYNDFKKLFGNKVDEPDLQDDFEKIVEWSTVFEDKRILREKLNEITWLSDQQKDVLESSRYQGWGRLSKKLLTGIVNDQGERIIDELWNTNKNFMQIQSDNDFAKRIHEANADQMKAVDVEDVLADAYTSPQNKKAIRQVVKVVDDIQKAMGGVAPKYISIEFTRSEDRNPRRTISRQRQLENTLKDTAKSLAKSINPELLSELDNAAKSKKGLTDRLYLYFTQLGKDIYTGKPINIDEISTYDIDHILPQAFVKDDSLNNRVLVSKAINNGKSDNVPVQLFGAKMGHFWKQLAEAGLISKRKLKNLQTDPDTISKYAMHGFIRRQLVETSQVIKLVANILGDKYRNDNTKIIEITARMNHQMRDEFGFIKNREINDYHHAFDAYLTAFLGRYLYHRYIKLRPYFVYGDFKKFKEDKVTMRNFNFLHDLTDDTQEKIADAETGEVIWDRENSIQQLKDVYHYKFMLISHEVYTLRGAMFNQTVYPASDAGKRKLIPIKADRPINVYGGYSGSADAYMAIVRIHNKKGDKYRVVGVPMRARDRLDAAKKVSDADCDRALKDVLTPQLTKTKKSRKTGEITQVVEDFEIVLGKVMYRQLMIDGDKKFMLGSSTYQYNAKQLVLSDQSVKTLASKGRLDPLQESMDYNNVYTEILDKVNQYFSLYDMNKFRHKLNLGFSKFISFPNHNVFDGNTKASSGKREILEEVLNGLHANPTFGNLKDIGITTPFGQLQQPNGILLSDEAKIRYQSPTGLFERTVSLKDL

SEQ ID NO: 215 - protein, 1090 aa, Sphingomonas sp.
MDWRLGLDLGANSLGWAALRLDRAGDPIGILAMGSRIFSDGRDPKSGASLAVDRRAARAMRRRRDRFKQRQAALLKYLIRDGLFPADQADRQRLADEDPYALRARALDEELSLFEIGRALFHLNQRRGFQSNRKADRGQDDEAGKIAVGVDRLNQQMEEQGARTLGEFLHQRRRAATDANHIPSVRTRLRPETGEGAKGDGYDFYPSRALIAEEFEEIWAAQAPHYPDTLTQQVHDRLYEIIFHQRPLRAPQVGQCTLVAGETRLPKAHPLFQKRRLLEEINALMIVRPGEIAQRLTPEERDTLYLKLKDKRTVSFATLRKTLKLDSAARFNKESENRTELKGDEVAAELGAKTRLGTRWQHLSGDQQWEVVHRLMALESQADEAAFRDWISQTYDLLPEQAAAVLGARLPQGHGRFGPTATTTLIDSLLHDRTEDGRVVVYSEAVQRSGLGHHSDLRHDRDDEDVTELPYYGVALERHIMPGTAEPTDPEEMRIGRLTNPTVHIGLNQLRHVVNRLIRAYGPPKEIAIELARELKLSEDEKKKRNSENRDNRLAAEGRSKKLEEIRQRDTGANRALLKLWEELNPGNVLDRRCIYTGEQISIDMLFSDRVEVDHILPFAQTLDDSNGNKLLCLREANREKRRRSPYEAWGHTDRWPDIAERASRLPKPKRWRFEPDAMQRFATEDGFLARHLVDTQYLGRLAREYLSWLYPGRGEGSGHVWVSPGRLTEMVRRKLGLNDLLPDHNFGGGADQPKNRLDHRHHAIDALVVAIVDRGMLQAIARASGQDGSEGRERIHIPAPWDGFRDDLRVAVNGIIVSHRPDHGTVAKAGLARGRDQTAGRLHNDTAYGLTGETDAKGNSIVVRRIPLSAIKKPADIARVRDPLLRNALAEFTKGLDGKAFEARIGRFHELGPLLYRGIRRVRVVETLTVIPIRDAEGRAYKGYKGDSNYRYDVWEMPDGKWRCQVVSMFDAHQSTEQARPHPAARKILSLQRNDILAIERTEGDRELVRVVKFSEKQFAVAPPHEGGSLKTRDGNADDPFRYLYPSPNTLKGWRARQVRIDELGRVLDPGFPARKSVRRTRPRAAPVD

SEQ ID NO: 216 - protein, 1000 aa, Kingella kingae
MARAQRRLISRRANRMNKLRRLLKQENVLQANDYDEKGLIIGLPNQAWELRAQGLDRKLEPKEWAAVLINLVKHRGYLSQRKNESQTADKELGALLSGMNHNHQLLQSQSNQYRTPAELAIKQFATQDGHIRNQRGAYTHTFNRLDLQNELNQLFDAQTRLGNPHVSGSLKTAINDLLMNQKAALSGDAILEMLGRCTFEPSEYKAAKNTYSAERFVWLGKLTNLRIQDNGLESALSREQRELLLNEPYNKTKLTYQQVRKLLRLPETAFFKGLRYGKDNAESATFMEMKSYHAIRKSLENKSLKSEWEKLKTQPKLLDLIGTAFSIYKTDDEIAGCLKNQLPENVIIALQEQLNFSNFMELSLKALEKLLPLMEQGLRYDEACTQIYGNRHEKIADKTEKFLPNIPADKLRNPVVLRTLTQARKVINAIIRRYGSPARVHIETGREVGKSFSDRDKLKKQQEENQEQRRRAIDEWKQFFPNAAHEPKAVDILKLRLYQLQQGKCLYSGLPIDVRRLPEKGYVEIDHALPFSRTWDDSFNNKILVLASENQNKGNQTPYEYLRGADNSESWRLFVENVQNCQFSPNKKQKIMAKQLDEKGFLERNLNDTRYVSRFLCQFISEHLHLTGKGKKRVFASNGQITALLRGRWGLSKNREENDRHHAVDAVVVACSTVAMQQKITQFVRYQKGNVFTGERIDKETGEVISIHFPTPWEHFREEVMIRVFDDNPLRTLPEKLPNRPEALHEYVMPLFVSRMPTRKMTGQGHKETIKSAKRLDEKISVLRVPLTQLKLNDLENMVNREREPALYEALKARLEQFKNDPAKAFAEPFFKQGGQQVKAVRVEIVQKSGMLLRKINGVADNGSMVRVDVFEKSGKFYLVPIYAWQVAEGILPNYAVVAHKDESDWILMDESYHFKFALYKNDLLEVQTKKGGIMGYFASLDRATGAITIREHDRDKKKCKDGEHRSIGVKMASSFKKLQVDELGKNIHETRSRKRPNIG

SEQ ID NO: 217 - protein, 1130 aa, Streptococcus pasteurianus
MTNGKILGLDIGIASVGVGIIEAKTGKVVHANSRLFSAANAENNAERRGFRGSRRLNRRKKHRVKRVRDLFEKYGIVTDFRNLNLNPYELRVKGLTEQLKNEELFAALRTISKRRGISYLDDAEDDSTGSTDYAKSIDENRRLLKNKTPGQIQLERLEKYGQLRGNFTVYDENGEAHRLINVFSTSDYEKEARKILETQADYNKKITAEFIDDYVEILTQKRKYYHGPGNEKSRTDYGRFRTDGTTLENIFGILIGKCNFYPDEYRASKASYTAQEYNFLNDLNNLKVSTETGKLSTEQKESLVEFAKNTATLGPAKLLKEIAKILDCKVDEIKGYREDDKGKPDLHTFEPYRKLKFNLESINIDDLSREVIDKLADILTLNTEREGIEDAIKRNLPNQFTEEQISEIIKVRKSQSTAFNKGWHSFSAKLMNELIPELYATSDEQMTILTRLEKFKVNKKSSKNTKTIDEKEVTDEIYNPVVAKSVRQTIKIINAAVKKYGDFDKIVIEMPRDKNADDEKKFIDKRNKENKKEKDDALKRAAYLYNSSDKLPDEVFHGNKQLETKIRLWYQQGERCLYSGKPISIQELVHNSNNFEIDHILPLSLSFDDSLANKVLVYAWTNQEKGQKTPYQVIDSMDAAWSFREMKDYVLKQKGLGKKKRDYLLTTENIDKIEVKKKFIERNLVDTRYASRVVLNSLQSALRELGKDTKVSVVRGQFTSQLRRKWKIDKSRETYHHHAVDALIIAASSQLKLWEKQDNPMFVDYGKNQVVDKQTGEILSVSDDEYKELVFQPPYQGFVNTISSKGFEDEILFSYQVDSKYNRKVSDATIYSTRKAKIGKDKKEETYVLGKIKDIYSQNGFDTFIKKYNKDKTQFLMYQKDSLTWENVIEVILRDYPTTKKSEDGKNDVKCNPFEEYRRENGLICKYSKKGKGTPIKSLKYYDKKLGNCIDITPEESRNKVILQSINPWRADVYFNPETLKYELMGLKYSDLSFEKGTGNYHISQEKYDAIKEKEGIGKKSEFKFTLYRNDLILIKDIASGEQEIYRFLSRTMPNVNHYVELKPYDKEKFDNVQELVEALGEADKVGRCIKGLNKPNISIYKVRTDVLGNKYFVKKKGDKPKLDFKNNKK

SEQ ID NO: 218 - protein, 1119 aa, Lactobacillus coryniformis
MGYRIGLDVGITSTGYAVLKTDKNGLPYKILTLDSVIYPRAENPQTGASLAEPRRIKRGLRRRTRRTKFRKQRTQQLFIHSGLLSKPEIEQILATPQAKYSVYELRVAGLDRRLTNSELFRVLYFFIGHRGFKSNRKAELNPENEADKKQMGQLLNSIEEIRKAIAEKGYRTVGELYLKDPKYNDHKRNKGYIDGYLSTPNRQMLVDEIKQILDKQRELGNEKLTDEFYATYLLGDENRAGIFQAQRDFDEGPGAGPYAGDQIKKMVGKDIFEPTEDRAAKATYTFQYFNLLQKMTSLNYQNTTGDTWHTLNGLDRQAIIDAVFAKAEKPTKTYKPTDFGELRKLLKLPDDARFNLVNYGSLQTQKEIETVEKKTRFVDFKAYHDLVKVLPEEMWQSRQLLDHIGTALTLYSSDKRRRRYFAEELNLPAELIEKLLPLNFSKFGHLSIKSMQNIIPYLEMGQVYSEATTNTGYDFRKKQISKDTIREEITNPVVRRAVTKTIKIVEQIIRRYGKPDGINIELARELGRNFKERGDIQKRQDKNRQTNDKIAAELTELGIPVNGQNIIRYKLHKEQNGVDPYTGDQIPFERAFSEGYEVDHIIPYSISWDDSYTNKVLTSAKCNREKGNRIPMVYLANNEQRLNALTNIADNIIRNSRKRQKLLKQKLSDEELKDWKQRNINDTRFITRVLYNYFRQAIEFNPELEKKQRVLPLNGEVTSKIRSRWGFLKVREDGDLHHAIDATVIAAITPKFIQQVTKYSQHQEVKNNQALWHDAEIKDAEYAAEAQRMDADLFNKIFNGFPLPWPEFLDELLARISDNPVEMMKSRSWNTYTPIEIAKLKPVFVVRLANHKISGPAHLDTIRSAKLFDEKGIVLSRVSITKLKINKKGQVATGDGIYDPENSNNGDKVVYSAIRQALEAHNGSGELAFPDGYLEYVDHGTKKLVRKVRVAKKVSLPVRLKNKAAADNGSMVRIDVFNTGKKFVFVPIYIKDTVEQVLPNKAIARGKSLWYQITESDQFCFSLYPGDMVHIESKTGIKPKYSNKENNTSVVPIKNFYGYFDGADIATASILVRAHDSSYTARSIGIAGLLKFEKYQVDYFGRYHKVHEKKRQLFVKRDE

SEQ ID NO: 219 - protein, 1126 aa, Lactobacillus farciminis
MADRISLGLDIGVASVGFSVLDIDKGKVIELGARLFSATVAAGNQDRRDMRGARRLLNRNKQRRQDTGKLFKKFGLIDDFDKGSFYDNFNQNLNPYELRVKGLTEQLTKEELAESLYQIVKHRGISYALKDADVDEGGTDYSVSLKINSQELAEKTPAQIQLQRLNDYGKVRGQVVIGDDPDNQKVLLNVFPTSAYEKEAKQIIATQQQFYPESLTDKFTEEYCQILTRKRDYFVGPGNEKSRTDYGIYKTDGRTLDNLFEELIGHDKIYPEELRASAASYTAQLFNVLNDLNNLRILNYEDGKLTKEDKEKIIAEIKNNTTTINMLNVIKKVAGCSKDDIKGFRVNEKDKPEISSMPVYRKIHKDLLKAGVDISDWPVEFIDELSFILTLNTENGEIRKQLNNRLAPKFDFLNADLIQLIIDNKDSFEIKTNNKWHRFSVKTMNKLIPEMMERPVEQMTLLNEMGLVKKDKKRFENNKYLPYKEIAKDIFNPVASKSVREALKIVNAVLKKYGHIDYLVVEMPRDKNLKEEQDNIKEFQNKNKKAKDAAFEAFVKSVGSEQRVKEALSKNRKLQMKMRLWYQQQEIDPYNGKTIDATDLINNPDKFEIDHIIPQSISFYDSINNKTLCFASMNQVKGQKTPYEFMLEGHGQSYDKFKATVMANKNFGKAKRANYLFEENVSDIETRKRFLSRNLVDTRYSSRVVLNSLQDFFREKSADTKVTVIRGKFTSNMRKHWHIDKTRETFHHHAIDASIIAATPFLRMWKKGGTIFPVKVGEESIDIETGEILDDKNFDKAMYEEPYSGFVSEIMNADDRIKFSHQVDKKMNRKVSDATIYSTRTGKLAKDKKDAEYIVAKVKDIYSVDGFKKFKKVYDKDKTKFLLYKYDPRTFSKLERIISDCPDKVEKVQTNGKVKAVDISPFEMYRRDHGMIKKYSKKGNGPAIKQLKYLDKKLGSHIDITPANANGKHVILQSLKPWRTDVYLNHETGEYEIMGIKYSDLKFNKNEGYGIKKDKYLEIKKVEEVSEKSEFMFSLYRKDRVKVQDMKTGESVELLFWSRNFSNKKYAELKPISQAENDKKLPVYGKGRLIKRLIPKNCKIWKVNTTILGDPYYLEKESDSPKDILD

SEQ ID NO: 220 - protein, 1380 aa, Eggerthella sp.
MNLRHVGNYNIGLDMGTASVGWAAIDEQGELLHFKGKPTWGSRLFDSANTAATARMPRGQRRRYIRRRWRLDLLQKFFSEEMAEKDPEFFIRLRQSSLWPEDREGGHTAYHWPLFNDSDFNEKEYYEKFPTIFHLRQWLMETDEKADIRLIYLAFHNIVKHRGNFLQENNDSLSAQNANMRESLESFCIALEEWCDEKELTCSCDPQKLEHLFKEVKYRSDIRDGFAALLGLACSGENEVDVKAMAKEMGKAIVGYKADFSKIFTECDKEGSSFRLSDDEGPEAFLDICPDDGIALFEAIQMVYSSFILTGMLTEKGLSLSKISAYNQYGQDLESLKALVKEYVPNEYSSFFRGPTYSGSTEYDPSKAQGYTRYNLGPSKKGSGAKPMAYEDFKKSVEQLFANTNAINDERYKEMMGRFAEEKFLRRLRTSDNGRIPFQLNLEEMTAIIINQGKYYPFLLEQQEKLESLVRFRIPYYVGPLTRINARLDSKGNACFAWSKRKDGMDSASIKPWNWDEVIDKHASAQAFIERMTGTCTYLRGEPVLPRCSLLYEEYCVLNELNGARWTQDGDKFIRFDYKDRSDIIEELFKKRRGRIQYAAVADWMKQERSHANVHVSGGQGENAFESRLSSYHFFCNDVFGVDELPGSYVDMVEEIILWSTLFEDRSILREEIQRKYGDVLNEEQIKTICKKRFSGWGRLSRKLLCSLKAQTDNGPKSIMDILQEGDQNNGRVGRAMVFQEILHDEQLGFEQKIEEENTQSMLEGENLLIEDLPGSPAIRRSINQAVRIVDEIVGIAGHAPDNIFIEVTREDDTKKKGKRTTTRYSNIQKALEALKEEGAEALRELKTYKHNELDKRLSLYFMQNGKSLYSGIPLDIRRLSEYQIDHIIPQSYIKDDSYENMALVLPGENQSKADNLLISQDIRIKMKATWTALHKAGLMGDKKYNNLMNSSISDAKMKGFINRQLVETSQSVKLTQMMLSQKYPGAKVRPIKASISSQLRDACDLVKCREANDYHHAHDAYLACQVGRFVLKRHSSMFDNPIGMTKVIRDFVKRQGQEFKRNGKLPAYASRSGFIVQSFMRSGFDAETGELLRDDWNAPFEIARIKRCLNYRDCYISRMPMEDSGAFWDATIYSPKAGKKGALPVKQGLPVEKYGSYSREQFAYFFVYKAYNPKKKAYRLEFEAVPVRVASAVETRENALEEYAKSVAKQAGLEFVEVARPKVYKYQLIELGEDRLYITGKREVRNASQLAFSLDEIDLLKRLAEGEETSSEERERLFDVLIEKYARYAPRLARQLSVDSMSATFETLNAEEQLGILLSLVEIANGKRNMIDLSSAGGSKNAGCMNPTFSSELSSPGSNFTFIDQSVTGMFERRQRLEL

SEQ ID NO: 221 - protein, 1430 aa, Capnocytophaga canimorsus
MKHILGLDLGTNSIGWAVVKEAQNDNEQSEIVDVGVRVNPLTTDEKTNFEKGKPISTNADRTLKRSARRNLQRYKLRRKELIELLKEHQLISTDTILTENGKGTTFQTLELRAKSAKEKISLEELARVFLTINKKRGYKSSRKAKNEDEGQLIDGMEIAKRLYEENLTTGQLSLQLLKEGKKSLPDYYRSDLQFELDKVWNFQKQFHSHILTDEFYAQLKGKGQRATSALFLAKYQIYTAENKGSREDKKLQAYQWRVDALSKELTREQLAFVITEINNNLNNSSGYLGAISDRSKELYFNNETVGEYLWKQIAANPHTSLKNQVFYRQDYLDEFEQIWKTQSAFYPEILTDELKKELRDVVIFYQRKLKSQKSLVSFCEFENKEIEIKKEDGTSTKKVIGLKVAPKSSPLFQEFKIWQNLNNVLIRKKGSKTKKVDKNQQAVLFEEEKTIFELDLEAKQALFNELNLKGNLKAYYCLEILGYSPKEWEMNYSVLEGNRTNKALYEAYLKITDLEGYDAKNHLKVKLNKDEVELDDLKVPASEIKDMVQAIFKEAGINTDILHFNAELDGKDFENQASYQLWHLLYSYEGDDSKSGNELLYKLLETKFGFKKEYAQILANVSLSDDYGSLSTKAMRKIHPYIKENKFSTACELAGYRHSKHSLTKEENDNRVLKDSLEVLKKNSLRQPVVEKILNQMINLVNALLKKYRTENPNFKFDEIRIELARELKKNAEERANMTVNINKAKTEHEKIIKILKNEFGLPNPTRNDIIRYRLYEELKANGYKDLYTNEYIEKQDLFTKNIDIEHIIPKSRVFDDSFSNKTLSFRKTNLDKGERTAFDYIESKFGADKLEEYVARVEDLYKNNIISKAKYQKLLKKESEIGDGFVERDLRETQYIAKKAKEILLQITPNVLSTSGGITDRLREDWDLINVMKELNLPKYRALGLTQMEDRKYGQQVEVIIDWTKRNDHRHHAMDALTVAFTKHNHIQYLNYLNARKNEKHREHSNIMGIQQLETIKVTDKNGNEKRVFKAPMPNFRQVTKAFLENVLISHKAKNKVVTKNKNKVAGSNKVQEVLTPRGQLHKETVYGKYQYYVQKEEKIGGKFDLETIKKVANPLYQSLLKKRLEENGGDPKKAFTGKNSLAKNPIYLDDAQTEQLPEKVKLVWLENSFSIRKDITPENFKDEKLIDKILDEGVKRILKERLQSFGNDAKKAFSDLDKNPIWLNKEKGIAIKRVAISGVANAEPLHTKKDHLGKEILDKEGKSIPVDFISTGNNHHVAVYRDEKGNLQEKVVSVFEAVVRANQGLPIIDKTYNQHLGWEFLFTMKQNEMFVFSNESTGFNPNDIDLLDPKNKKIISPNLFRVQKFSKLQYGNSFVREFVFRHHLETTVEDRKELQGITYKQMKNSAFFNDIIKVRINHLGGIVSVGEY

SEQ ID NO: 222 - protein, 1348 aa, Finegoldia magna
MKSEKKYYIGLDVGTNSVGWAVTDEFYNILRAKGKDLWGVRLFEKAKTAADTRTFRSGRRRNDRKGVRLQILREIFEDEIKKVDKDFYDRLDESKFWAEDKKVSGKYSLFNDKNFSDKQYFEKFPTIFHLRKYLMEEHGKVDIRYYFLAINQMMKRRGHFLIDGQISHVTDDKPLKQQLILLINDLLKIELEEEFMDSIFEILADVNEKKTEKKNILKELINAQDFNKQEGKILYSIFESIVTGKAKIKNIISDEDILEKIKEDNKEDFVLTGDSYEENLQYFEEVLQENITLFNTLKSAYDFVILQSILKGKSTLSDAQVERYDEHKKDLEILKKVIKKYDEDGKLFKQVFKEDNGNGYVSYIGYYLNKNKKITAKKKISNIEFTKYVKGILEKQCDCEDEDVKYLLGKIEQENFLLKQISSINSVIPHQIHLFELDKILENLAKYYPSFNNKKEEFTKIEKIRKTFTFRIPYYVGPLNDYHKNNGGNAWIFRNKGEKIRPWNFEKIVDLHKSEEEFIKRMLNQCTYLPEETVLPKSSILYSEYMVLNELNNLRINGKPIDTDVKLKLIEELFKKKTKVTLKSIRDYMIRNNFADKEDFDNSEKNLEIVSNMKSYIDFNNILGDKFELEMVEDLIEKITIHTGNKKLLKKYIEETYPDLSSSQIQKIINLKYKDWGRLSRKLLDGITGTNIETGEIDTVINFLRNSSDNLMQIIGSQNYSFNNDIDKLRKKYIPQEISYEVVENLYVSPSVKKMIWQVIRITEEITKVMGYDPDKIFIEMAKSEEGKKTTISRKNKLLALYKAIKKDERDSQYEKLLTGLNKLDDSDLRSRKLYLYYTQMGRDMYTGEKIDLDKLFDSTHYDKDHIIPQSMKKDDSIINNLVLVNKNANQTTKGNIYPVPSSIRNNPKIYNYWKYLMEKEFISKEKYNRLIRNTPLTNEELGGFINRQLVETRQSTKAIKELFEKFYKKSKIIPVKAILASDLRKDMNTLKSREVNDLHHAHDAFLNIVAGDVWNREFTSNPINYVKENREGDKVKYSLSKYFTRPRKSKGKVIWTPEKGRKLIVDTLNKPSVLISNESHVKKGELFNATIAGKKDYKKGKIYLPLKKDDRLQDVSKYGGYKAINGAFFFLVEHTKSKKRIRSIELFPLHLLSKFYEDKNTVLDYAINVLQLQDPKIIIDKINYRTEIIIDNFSYLISTKSNDGSITVKPNEQMYWRVDEISNLKKIENKYKKDAILTEEDRKIMESYIDKIYQQFKAGKYKNRRTTDTIIEKYEIIDLDTLDNKQLYQLLVAFISLSYKTSNNAVDFTVIGLGTECGKPRITNLPDNTYLVYKSITGIYEKRIRIK

SEQ ID NO: 223 - protein, 1352 aa, Megasphaera sp.
MKKRNREEYYVGLDIGTSSVGWAVATPDYRIPKFRGHKMWGSRLFAEGKRAAERRQFRTNRRRLARRRDRLQILEELFAEEMAKVDNTFFMRLKESKFFLEDKTVKEKHILFSTDKFDADRFYKDNPTIYHVRKRLMEEEPQDIRELFLAVHHILKYRGHFLFAGSLEQNGASIEELVRTLLGKQGLAILDDTIDSNEMVNILKNTGETKSDRKKDVQELWNPLKDKVKKAQAAEMAGLVLGLKSDISKLFANSDYKDLDSSIKNINFSSGDYEEKRDDYANSIGDDIVLLDTMKALYDTLILSQILQGKRSISAAKVEDYNTHKEQLRALKAILKPHKRLYNEMFRENNKKDLSNYVAYISSYSEGKRVNREGFYKYVQAVLKQVDDSDSKQAILEAIRLETFLPLLRVKDNAVIPHQIHQAELEAILETARKKYNFLNDVSDGVSVKDKIIQLFTFRIPYYVGPLNPHSGETVADRKQGTGWVVRKQRGKVYPWNFADMVDVKASAEAFITNLTNKCTYLIGEDVLPKRSLLYSEFMLLNELNMIKYDGHELPVAIKQLYIEQVFKQEHKKQTKGRVLDFLKRNGLITGSATAVITGMDDAIKGDLQSYRDMVRIFGAGFDHSMAERIIRWVTLFGEAKDILENKIREVYGNSISDSQMRAIKKLKYADWGRLSQAFLIAVKGCDKSGVERNIITCLRASSQNLMEILSDQGTYIKQIKAWNHQHTTNMMDTLDYQLVDDLYVAPSVKRSIWQSLCIVEELVKIMGQAPKKIFVEVTRTKQAEKTKKDSRKKRLVELYTAIGKEGAAWKKEIEAHQAGDFRRKKLYLYYTQMGRCMYSNEPIAMDALFTSAYDIDHIYPQSLTKDGSWDNLVLVKSQLNKEKSDQYPLRPAIREKNKAHWQYLCRAGFISEKKYERLMRTTELTAEELSGFIARQLVETSQATKAVTGLLERIYTNTEICFVKAETVSQFRHQHNFIKIRELNNYHHAKDAYLNIVVGNVYHEKFTKNPWEFIARSTERRPYNLNRMYDFDLLKQGRVIWQVPKSLETVQAMMKSNDVRITKKLLVQKGELYDATITKAHKAKEGTYFPLKGADARLRDVHRYGGYEKIKIAYYSVFSCREKASNTIHTLIIPIPVYKAGLLQTEADLTAYAWQTKQKTKPIKDIYSAITPIYKKLCINTVVKIDGFKYFLGGKTGDYMWLDPAIPVVLDEQAAAYLKAISKVGRADDVENTAQAIDLITAEANEAFYDVLLKKMEAKIFAKAYQTIVEKLASETARERFRELSIGAQCSCLLEILNLLANNKTTFTFFKDKMGVTMSRRKQPMDLTKLEECIVYETSITGLYEKAVSLL

SEQ ID NO: 224 - protein, 650 aa, Haemophilus pittmaniae
MENKNLHYILGLDLGIASVGWAVVEIDKEENPLCLIDVGVRTFERAEVPKTGESLALSRRLARSARRLTQRRVARLKKAKRLLKLENILLSTDERLPHQVWQLRVEGLDRKLKRQEWAAVLLHLIKHRGYLSQRKNESKSENKELGALLSGVASNHELLQQTTYRTPAELAVKKFEVEEGHIRNQQGAYTHTFSRLDLLAEMELLFSRQQHFGNPFASEKLLENLTALLMWQKPALSGEAILKMLGKCTFEDEYKAAKNTYTAERFVWITKLNNLRIQENGLERALNDNERLILIEQPYEKAKLTYAQVRSILNLSDEAIFKGLRYSGEDKKAIETKTTLMEMKAYHQIRKVLEGNNLKAEWTELKENSTLLDEIGTAFSLYKTDEDISTYLAGKLSQPVLNALLENLSFDKFIQLSLKALYKLLPLMQQGLRYDEACHEMYGDHYGKKTYGKKTEENHYFLPQIPADEIRNPVVLRTLTQARKVINGVVRLYGSPARIHIETGREVGKSYKDRRELEKRQEENRKQRENAIKEFKEYFPHFAGEPKAKDILKMRLYKQQNAKCLYSGKPIELHRLLEKGYVEVDHALPFSRTWDDSFNNKVLVLANENQNKGNLTPFEWLDGKHNSERWRAFKALVETSAFPYAKNNAS

SEQ ID NO: 225 - protein, 1062 aa, Ralstonia syzygii
MAEKQHRWGLDIGTNSIGWAVIALIEGRPAGLVATGSRIFSDGRNPKDGSSLAVERRGPRQMRRRRDRYLRRRDRFMQALINVGLMPGDAAARKALVTENPYVLRQRGLDQALTLPEFGRALFHLNQRRGFQSNRKTDRATAKESGKVKNAIAAFRAGMGNARTVGEALARRLEDGRPVRARMVGQGKDEHYELYIAREWIAQEFDALWASQQRFHAEVLADAARDRLRAILLFQRKLLPVPVGKCFLEPNQPRVAAALPSAQRFRLMQELNHLRVMTLADKRERPLSFQERNDLLAQLVARPKCGFDMLRKIVFGANKEAYRFTIESERRKELKGCDTAAKLAKVNALGTRWQALSLDEQDRLVCLLLDGENDAVLADALREHYGLTDAQIDTLLGLSFEDGHMRLGRSALLRVLDALESGRDEQGLPLSYDKAVVAAGYPAHTADLENGERDALPYYGELLWRYTQDAPTAKNDAERKFGKIANPTVHIGLNQLRKLVNALIQRYGKPAQIVVELARNLKAGLEEKERIKKQQTANLERNERIRQKLQDAGVPDNRENRLRMRLFEELGQGNGLGTPCIYSGRQISLQRLFSNDVQVDHILPFSKTLDDSFANKVLAQHDANRYKGNRGPFEAFGANRDGYAWDDIRARAAVLPRNKRNRFAETAMQDWLHNETDFLARQLTDTAYLSRVARQYLTAICSKDDVYVSPGRLTAMLRAKWGLNRVLDGVMEEQGRPAVKNRDDHRHHAIDAVVIGATDRAMLQQVATLAARAREQDAERLIGDMPTPWPNFLEDVRAAVARCVVSHKPDHGPEGGLHNDTAYGIVAGPFEDGRYRVRHRVSLFDLKPGDLSNVRCDAPLQAELEPIFEQDDARAREVALTALAERYRQRKVWLEELMSVLPIRPRGEDGKTLPDSAPYKAYKGDSNYCYELFINERGRWDGELISTFRANQAAYRRFRNDPARFRRYTAGGRPLLMRLCINDYIAVGTAAERTIFRVVKMSENKITLAEHFEGGTLKQRDADKDDPFKYLTKSPGALRDLGARRIFVDLIGRVLDPGIKGD

SEQ ID NO: 226 - protein, 1052 aa, Haemophilus parainfluenzae
MENKNLHYILGLDLGIASVGWAVVEIDEKENPLRLIDVGVRTFERAETQKGESLALSRRSARSARRLTQRRVARLKKAKRLLKSENILLSTDERLPHQVWQLRVEGLDRKLERQEWAAVLLHLIKHRGYLSQRKNESKSENKELGALLSGVASNHELLQQATYRTPAELAVKKFEVEEGHIRNQQGAYTHTFSRLDLLAEMELLFSRQQHFGNPFASEKLLENLTALLMWQKPALSGEDILKMLGKCTFEDEYKAAKNTYTAERFVWITKLNNLRIQENGLERALSDNERLMLIEQPYEKAKLTYAQVRSILNLSDDAIFKGVRYSGEDKKAIETKTTLMEMKAYHQIRKVLEGNNLKAEWVALKANPTLLDEIGTAFSLYKTDEDISAYLAGKLSQPVLNALLENLSFDKFIQLSLKALYKLLPLMQQGLRYDEACREIYGDHYGKKTEETHHFLPQIPADEIRNPVVLRTLTQARKVINGVVRLYGSPARIHIETGREVGKSYKDRHELKKRQEENRKQREKTISEIKTLFPNFSGEPKGKDILKMRLYYQQNAKCLYSGKPLELHRLFEQKYVEVDHALPLSRTWDDSFNNKVLVLANENQNKGNLTPFEWLDGKNNSERWRTFKALVETSAFPYAKKQRILSQKLDEKGFIERNLNDTRYVARFLCNFIADNMHLTGEGKRKVFASNGQITALLRRRWGLAKSREDNDRHHALDAVLVACSTVAMQQKITRFVRFKAGDVFTGERIDRETGEIIPLHFPTPWQFFKQEVEIRIFSDNPKLELENRLPDRPQANHEFVQPLFVSRMPTRKMTGQGHMETVKSAKRLNEGISMIKMPLTKLKLKDLELMVNREREKDLYDALKTRLEAFNDDPAKAFAEPFMKKGGAIVKSVRVEQVQKSGVLVRQGNGVADNASMVRVDVFTKDGKYFLVPIYTWQVAKGILPNKAVIQGKDEEDWEDIDDATFQFSLHPNDLISVKTKKDEFLGYFNGLNRHTGGINIRTHDLEKSKGKQGIFEGIGVKIALSFEKYQIDELGKNIRLCKPSKRQPVR

SEQ ID NO: 227 - protein, 1331 aa, Lactobacillus sanfranciscensis
MNKQPYNIGLDIGTSSVGWSATELDNRLLHIKGHNGIGVRLFKEGESAADRRGFRTTRRRLARRKWRLRLLNEIFATEIAKVDPSFFARLKQSNVSPKDPNKTMFENILFDDENLDDQKFHHDYKTIYHLRQAIINHPEQKFDIRLIYLAMHHIIKYRGHFLNQANVQDFKGGKIDLEKSFKALNDIFENQGRDLRLVTDKANQYVKVLSDNAKTRSDRKKELSKLLYVPIDKDTDKNSKKVTGEILKAILGNKAKFDVIFGIEVENPKEWVLTFNSDDFDDKIEGLSSQMTDEDSEILLILKELYFALNLSDILNNSVTDKNAKTLSEAMINRYDDHKNQLAMLKKVIDSSDKKHAKELKEAYSAYIDGENNKKISFEDLKKRIQKNLVDSELSQKINDLLDHDYFLPKQRSKENGAIPHQLQQQELDQIIESQKQYYPFLAELNPNEKRSRQAKYKLDELVAFRVPYYVGPMVEVTDSNQENNGKFAWMIRKEQGEITPWNFDEKVDRTETATKFITRMTTTDTYLIGEPVLPKNSLLYQKFVVLNELNNLKINQEIITPGQKQYLYEHVMKKNKRVTLKKIADALVIKGDYPYAPEVKGTTDQKNLNNGLTTYIDLAKIFGNELDDVDREADFEKIIEWSTIFEDQHIFALKLQELKWLTEKQRNQVVKLRYQGWGKLSKELLAGLVDDNGQRIIDLLWSDNQNFMQIVNQKSFKESIADHNGAHLEEKNLKDVINDLYTSPQNKKAIRQVILVVDDIINAVGYEPANIMMEFAREDSNDHRLTNSRSRQLENVYKDITNSWFDNDSVKDELEDKIKNKDKFTDRLYLYFTQGGKDLYTGEPLNIDDLSSYDIDHILPQSFILDNSLDNRVLTSQRNNRVSKEDQLPGELFGTKMHAFWKRLKAAHLISNKKYYNLTLTPNSISKFNNQGRFINRQLVETRQVIKLAAEILHNRYSEEKGTNIVTIKANLTHHMREKFNFYKNRNVNDYHHAFDAYLTAFVGNWLLQQYPKLKPYFVYGDFAKTEINNLKSFNMLYKFEQAHQLNEKDGKIAKDADALLGYMKNVYHFKKMLVTKKLETNHGALFKQTLYPSPAHDIKKRQLIKPKDNRPTDIYGGYTHEERKYMSLVKVIGKKDNEYRMANVPLLKINKNNDIKEILKSQFSNKKFEIVLPKVLKNQLFSENGALFVIGSKGYKYNANQLVLSDLDMKLLNDLSNNKSIDEVTINQLFKNIVDSTNKYMPLYEIKNLNEVVEKFNNLEFNDKKKTITDFLLATHANPTMSNLKNIGLPSYFGRFTSGNAGIKLSENANVIYQSPTGLFSRKVKISDF

SEQ ID NO: 228 - protein, 1473 aa, Flavobacterium branchiophilum
MAKILGLDLGTNSIGWAVVERENIDFSLIDKGVRIFSEGVKSEKGIESSRAAERTGYRSARKIKYRRKLRKYETLKVLSLNRMCPLSIEEVEEWKKSGFKDYPLNPEFLKWLSTDEESNVNPYFFRDRASKHKVSLFELGRAFYHIAQRRGFLSNRLDQSAEGILEEHCPKIEAIVEDLISIDEISTNITDYFFETGILDSNEKNGYAKDLDEGDKKLVSLYKSLLAILKKNESDFENCKSEIIERLNKKDVLGKVKGKIKDISQAMLDGNYKTLGQYFYSLYSKEKIRNQYTSREEHYLSEFITICKVQGIDQINEEEKINEKKFDGLAKDLYKAIFFQRPLKSQKGLIGKCSFEKSKSRCAISHPDFEEYRMWTYLNTIKIGTQSDKKLRFLTQDEKLKLVPKFYRKNDFNFDVLAKELIEKGSSFGFYKSSKKNDFFYWFNYKPTDTVAACQVAASLKNAIGEDWKTKSFKYQTINSNKEQVSRTVDYKDLWHLLTVATSDVYLYEFAIDKLGLDEKNAKAFSKTKLKKDFASLSLSAINKILPYLKEGLLYSHAVFVANIENIVDENIWKDEKQRDYIKTQISEIIENYTLEKSRFEIINGLLKEYKSENEDGKRVYYSKEAEQSFENDLKKKLVLFYKSNEIENKEQQETIFNELLPIFIQQLKDYEFIKIQRLDQKVLIFLKGKNETGQIFCTEEKGTAEEKEKKIKNRLKKLYHPSDIEKFKKKIIKDEFGNEKIVLGSPLTPSIKNPMAMRALHQLRKVLNALILEGQIDEKTIIHIEMARELNDANKRKGIQDYQNDNKKFREDAIKEIKKLYFEDCKKEVEPTEDDILRYQLWMEQNRSEIYEEGKNISICDIIGSNPAYDIEHTIPRSRSQDNSQMNKTLCSQRFNREVKKQSMPIELNNHLEILPRIAHWKEEADNLTREIEIISRSIKAAATKEIKDKKIRRRHYLTLKRDYLQGKYDRFIWEEPKVGFKNSQIPDTGIITKYAQAYLKSYFKKVESVKGGMVAEFRKIWGIQESFIDENGMKHYKVKDRSKHTHHTIDAITIACMTKEKYDVLAHAWTLEDQQNKKEARSIIEASKPWKTFKEDLLKIEEEILVSHYTPDNVKKQAKKIVRVRGKKQFVAEVERDVNGKAVPKKAASGKTIYKLDGEGKKLPRLQQGDTIRGSLHQDSIYGAIKNPLNTDEIKYVIRKDLESIKGSDVESIVDEVVKEKIKEAIANKVLLLSSNAQQKNKLVGTVWMNEEKRIAINKVRIYANSVKNPLHIKEHSLLSKSKHVHKQKVYGQNDENYAMAIYELDGKRDFELINIFNLAKLIKQGQGFYPLHKKKEIKGKIVFVPIEKRNKRDVVLKRGQQVVFYDKEVENPKDISEIVDFKGRIYIIEGLSIQRIVRPSGKVDEYGVIMLRYFKEARKADDIKQDNFKPDGVFKLGENKPTRKMNHNQFTAFVEGIDFKVLPSGKFEKI

SEQ ID NO: 229 - protein, 933 aa, Mycoplasma iowae
SVRDYSDGPGSEKSPTPYGLWRLNKEGKVEKIGENLWDVLVGKCTIYGNDDSIKDEKTKLRGGKNSPIAEVFNFINDLTNIYLFSSSKLKLNSKTKLSILDEFNISLKTSKPIKSFSEKKLVKHIISTTEFKDINFDDVYGYRIDTSKKPLFTKLENTITIAKWLLDNNVYNELNIYDQEDLIKINNIFVILQKSMDINKRAQLVSDEYKIDLPICLELVKKIKGVMQTHSFSYKAMLEYIPVGIKYNDLETGEDTSINASTYFVDKINNLNTKLLFNGRPRKYIPKNIFEDGIISPTSKRAFIQTINVLNKIIKVYSKDYDIDNIAIELPRDKNTAEERKKISSNQKKAGEEIAEVLKFAGLNVEEYTSKLNSKTKLKLKLLKEQNYKDIYDGQEIDVIDVIKNSNKYHEEHIIPYSLCFIDSRRNKVLTKFENNKQKGNKTPFQWLSSIGKYAEFKDRVEKLFVEQKISKAKKELLLFEQDPRTEMLGFIEKNLSDTRYASKLVFDTFRDFFKVNNPNVKIKVINGALTNYARYNLFATYKDGLLERKGIMKQREFYEHHGIDATILAFLGSNHKINQLLKLSHKFKKQDDNKIYDENTGELIEFTKDFLSDEARKKAMELSKQIFEIPCKFSRPIYRKSNVSFSNETLISMKWIDDKYTKGVKINKLSLVNKDLDLNEYFADYETNEMKNLICYQEDKTLYNKLKNIYDKYNNFVENSNIKPVKNPFINYMISNFSSDDSKIQNFKHIIFYDHKGNKKFVKSLKVCGDEKNLSNIVLRKDQKDIMNSKKIKKSGILESLNPISARIYKDNKGKYITIPINSLVLNWTKKGLEIDNEKLCNILKSKNIFNNQFIEINAGQSIINNENKLFYFVGGGDFKVNKLEIKSQFCDNEIFFPRKQMNISIATIIDNYKLCEVDELGKIYNIRKIVL

SEQ ID NO: 230 - protein, 1358 aa, Acidaminococcus intestini; identical to SEQ ID NO: 94

SEQ ID NO: 231 - protein, 983 aa, Campylobacter jejuni
MARILAFDIGISSIGWAFSENDELKDCGVRIFTKAENPKTGESLALPRRLARSARKRLARRKARLNHLKHLIANEFKLNYEDYQSFDESLAKAYKGSLISPYELRFRALNELLSKQDFARVILHIAKRRGYDDIKNSDDKEKGAILKAIKQNEEKLANYQSVGEYLYKEYFQKFKENSKEFTNVRNKKESYERCIAQSFLKDELKLIFKKQREFGFSFSKKFEEEVLSVAFYKRALKDFSHLVGNCSFFTDEKRAPKNSPLAFMFVALTRIINLLNNLKNTEGILYTKDDLNALLNEVLKNGTLTYKQTKKLLGLSDDYEFKGEKGTYFIEFKKYKEFIKALGEHNLSQDDLNEIAKDITLIKDEIKLKKALAKYDLNQNQIDSLSKLEFKDHLNISFKALKLVTPLMLEGKKYDEACNELNLKVAINEDKKDFLPAFNETYYKDEVTNPVVLRAIKEYRKVLNALLKKYGKVHKINIELAREVGKNHSQRAKIEKEQNENYKAKKDAELECEKLGLKINSKNILKLRLFKEQKEFCAYSGEKIKISDLQDEKMLEIDHIYPYSRSFDDSYMNKVLVFTKQNQEKLNQTPFEAFGNDSAKWQKIEVLAKNLPTKKQKRILDKNYKDKEQKNFKDRNLNDTRYIARLVLNYTKDYLDFLPLSDDENTKLNDTQKGSKVHVEAKSGMLTSALRHTWGFSAKDRNNHLHHAIDAVIIAYANNSIVKAFSDFKKEQESNSAELYAKKISELDYKNKRKFFEPFSGFRQKVLDKIDEIFVSKPERKKPSGALHEETFRKEEFYQSYGGKEGVLKALELGKIRKVNGKIVKNGDMFRVDIFKHKKTNKFYAVPIYTMDFALKVLPNKAVARSKKGEIKDWILMDENYEFCFSLYKDSLILIQTKDMQEPEFVYYNAFTSSTVSLIVSKHDNKFETLSKNQKILFKNANEKEVIAKSIGIQNLKVFEKYIVSALGEVTKAEFRQREDFKK

SEQ ID NO: 232 - protein, 1338 aa, Streptococcus macacae
MTKPYSIGLDIGTNSVGWAVVTDGYKVPAKKMKVLGNTDKSHIKKNLLGALLFDSGNTAKDRRLKRTARRRYTRRRNRILYLQEIFAEEMAKADESFFQRLNESFLTNDDKEFDSHPIFGNKAEEEAHHHKFPTIFHLRKHLADSTEKSDLRLIYLALAHMIKFRGHFLIEGQLKAENTNVQTLFDDFVEVYDKTVEESHLSEISVSSILTEKISKSRRLENLIKYYPTEKKNTLFGNLIALSLGLQPNFKTNFKLSEDAKLQFSKDTYEEDLGELLGKIGDNYADLFISAKNLYDAILLSGILTIDDNTTKAPLSASMIKRYEEHQEDLAQLKKFIRQNLPDQYSEVFSDKTKDGYAGYIDGKTNQEAFYKYIKNMLSKTEGADYFLDKIDREDFLRKQRTFDNGSVPHQIHLQEMHAILRRQGEYYPFLKENQDKIEKILTFRIPYYVGPLARKGSRFAWAEYKADKKVTPWNFDDILDKEKSAEEFITRMTLNDLYLPEEKVLPKHSLVYETFNVYNELTKVKYVNEQGKAIFFDANMKQEIFDHVFKENRKVTKDKLLNYLNKEFEEFRIVNLTGLDKENKAFNSSLGTYHDLRKILDKSFLDDKVNEKIIEDIIQTLTLFEDREMIRQRLQKYSDIFTTQQLKKLERRHYTGWGRLSAKLINGIRDKQSNKTILGYLIDDGYSNRNFMQLINDDSLPFKEEIARAQVIGETDDLNQLVSDIAGSPAIKKGILQSLKIVDELVKVMGHNPANIVIEMARENQTTAKGRRSSQQRYKRLEEAIKNLDHDLNHKILKEHPTDNQALQNDRLFLYYLQNGRDMYTEDPLDINRLSDYDIDHIIPQSFIKDDSIDNKVLVSSAKNRGKSDNVPSEDVVNRMRPFWNKLLSCGLISQRKYSNLTKKELKPDDKAGFIKRQLVETRQITKHVAQILDARFNTKRDENKKVIRDVKIITLKSNLVSQFRKDFKFYKVREINDYHHAHDAYLNAVIGKALLDVYPQLEPEFVYGEYPHFHGYKENKATAKKFFYSNIMNFFKKDDIRTDENGEIVWKKDEHISNIKRVLSYPQVNIVKKVEIQTVGQNGGLFDDNPKSPLEVTPSKLVPLKKELNPKKYGGYQKPTTAYPVLLITDTKQLIPISVMNKKQFEQNPVKFLRDRGYQQVGKNDFIKLPKYTLVDIGDGIKRLWASSKEIHKGNQLVVSKKSQILLYHAHHLDSDLSNDYLQNHNQQFDVLFNEIISFSKKCKLGKEHIQKIENVYSNKKNSASIEELAESFIKLLGFTQLGATSPFNFLGVKLNQKQYKGKKDYILPCTEGTLIRQSITGLYETRVDLSKIGED

SEQ ID NO: 233 - protein, 1265 aa, Mycoplasma ovipneumoniae
MHNKKNITIGFDLGIASIGWAIIDSTTSKILDWGTRTFEERKTANERRAFRSTRRNIRRKAYRNQRFINLILKYKDLFELKNISDIQRANKKDTENYEKIISFFTEIYKKCAAKHSNILEVKVKALDSKIEKLDLIWILHDYLENRGFFYDLEEENVADKYEGIEHPSILLYDFFKKNGFFKSNSSIPKDLGGYSFSNLQWVNEIKKLFEVQEINPEFSEKFLNLFTSVRDYAKGPGSEHSASEYGIFQKDEKGKVFKKYDNIWDKTIGKCSFFVEENRSPVNYPSYEIFNLLNQLINLSTDLKTTNKKIWQLSSNDRNELLDELLKVKEKAKIISISLKKNEIKKIILKDFGFEKSDIDDQDTIEGRKIIKEEPTTKLEVTKHLLATIYSHSSDSNWININNILEFLPYLDAICIILDREKSRGQDEVLKKLTEKNIFEVLKIDREKQLDFVKSIFSNTKFNFKKIGNFSLKAIREFLPKMFEQNKNSEYLKWKDEEIRRKWEEQKSKLGKTDKKTKYLNPRIFQDEIISPGTKNTFEQAVLVLNQIIKKYSKENIIDAIIIESPREKNDKKTIEEIKKRNKKGKGKTLEKLFQILNLENKGYKLSDLETKPAKLLDRLRFYHQQDGIDLYTLDKINIDQLINGSQKYEIEHIIPYSMSYDNSQANKILTEKAENLKKGKLIASEYIKRNGDEFYNKYYEKAKELFINKYKKNKKLDSYVDLDEDSAKNRFRFLTLQDYDEFQVEFLARNLNDTRYSTKLFYHALVEHFENNEFFTYIDENSSKHKVKISTIKGHVTKYFRAKPVQKNNGPNENLNNNKPEKIEKNRENNEHHAVDAAIVAIIGNKNPQIANLLTLADNKTDKKFLLHDENYKENIETGELVKIPKFEVDKLAKVEDLKKIIQEKYEEAKKHTAIKFSRKTRTILNGGLSDETLYGFKYDEKEDKYFKIIKKKLVTSKNEELKKYFENPFGKKADGKSEYTVLMAQSHLSEFNKLKEIFEKYNGFSNKTGNAFVEYMNDLALKEPTLKAEIESAKSVEKLLYYNFKPSDQFTYHDNINNKSFKRFYKNIRIIEYKSIPIKFKILSKHDGGKSFKDTLFSLYSLVYKVYENGKESYKSIPVTSQMRNFGIDEFDFLDENLYNKEKLDIYKSDFAKPIPVNCKPVFVLKKGSILKKKSLDIDDFKETKETEEGNYYFISTISKRFNRDTAYGLKPLKLSVVKPVAEPSTNPIFKEYIPIHLDELGNEYPVKIKEHTDDEKLMCTIK

SEQ ID NO: 234 - protein, 1535 aa, Flavobacterium columnare
MTKILGLDLGTNSIGWAIRDTENEGINQILDKGARIFSEGVKSENGKEISRAAERTAYRSARKIKYRRKLRKYETLKVLSINGMCPLSVEEVEQWKKSGFKEYPLNPEFLDWLRTNEDKNINPYLFRDKASKQKVTLFELGRALYHIAQRRGFLSNRLDQSAEGVFEEHNPQIQNLIEDLDSSNTILNELKEYYINLGIIDETEKSGFKKDLDEGEKKLKSLYNSLVAITKKNANDIETCKQELIARLNKKEDLGKVKGKIKDISQAMLDRNFKTLGQYFFSLYNKERIRNQYTSREEHYLEEFIIICQTQGIEGINTNEKLPEKKFTGLAKDLYRAIFFQRPLKSQKGLIGKCSFEKNKSRCAVSHPDYEEFRMWSYLNTIKIGTQSEKTLRFLTLEEKLKLVPKFYRKSDFNFEVLAKELVEKGASFGYYKSSKKNEFFYWFNYKPTDSVSACVVSASLENAIGKDWKIKTFEYQTRNTEKNEVTKSVDYKDLWHLLSVATSDTYLYDFAIEKLKLEPKNAKAFSKTKLKKDFASLSLAAIAKILPYLKQGLLYSHAVFMANIENIVDADIWKDEEQQKFIQSKIVELVDNYIVEKSKLELINGLLKIYNTEDKEGRKVYYSKEAESLFEADLRKKLVPFYKANIIIEEHEQEIIFQDLFPILMDQLKKQEFIKIGRLDKQIEAFLEGENEEGQIFCNHTDKLKKLYHPSDIEVFKKKTIKDEWGNEKVVLGSPLTTSIKNPMAMRALHQLRKVLNTLIANDQIDEDTRIHIEMARELNDANKRKGIQDFQNENKKFREEAIKEIKKLYLEECHKDVNPTEDDILRYQLWLEQGKCEIYEEGNNISICDIIGSNPSYDIEHTIPRSISQDNSQMNKTLCSLKFNRSIKKQKMPVELSNYNDILPRIAHWKKEAEELTRQIETISRSIKSAATKVAKDKNIRKRHYLTLKRDYILGKYERFTWEEPKVGFKNSQIPDTGIITKYAQAYLKSYFKRVESVKGGAVAEFRKLWGIQESFIDENWWKHYKDKDRDKHTHHTIDAITIACMPKDKYDLLAHAWRLEDEQDKKAAKVLIEQAKPWKTFKEDIEKIETEILVSHFTPDNVKKQSKSIIKNRGKKVYVLKNELPVNFKNKIEGKDYFKLKFDSKILYKIPKKKEKQTDTFYEELPKNYLNGVEGKDYFKINTTGKTFYKIPIFNQGDTIRGSLHQETTYGAIKLPDIDIETKKPLHTDKGGFILKKDIKGNEIVFFVVRKEISKISENDVQNIVDNVVRKKIENAIANSLITFKIVKKKKVAVIKEGVTIWMREPNIEKGIEGIPIKKVRIITNSVKNPIEIKVHSPLSKSRHKHKQKVYGQNDENYAMALYELDGKREFELINNFNLAKLLKQSQSYYPLHKEKEIKGKKILVPIEKRNNKDVILKRGQQVVFYDKTVENPKDISEIIDFRERIYIIEGLTIQRQKDKKTSKVNEYGIIQLRHFKEARKSEEISKDNFKPDGEFKINENKPTRKMNHNQFTAFVEGIDFKVLPSGKFQKI

SEQ ID NO: 235 - protein, 1459 aa, Flavobacterium columnare
MKFNLGLDIGTNSIGWALVNEDYENKKGKIIAAGSRIIPMTQDILDKFGSGAITETQTALRTDYRSKRKLIQRFLLRRERLHRVLNVLDFLPKHYAESIDFEKYFGKFLPNTEPKLAYNQNQFIFQNSFLEMLKEFQEKHPELLTNNKKIPYDWTIYYLRKKALNQRIEKEELAWLLLQFNQKRGYNQLRDEEEESVPNKQVEFYSLKIIDVVADQPKEGRDKRWYSINLENGWTYRRESKTPLFNWEGKTKDFIVTTDLNQDGSIKKDKEGKEKRSFRAPSEGDWTLLKKKTEKEIYESGKTLGTYIYDALLNTPDLKIKGDFIRTIDRSIYKEELQQIINKQKEYHLELNSSKLYKACLEELYPKNEIYKSALKNKDIAYLFINDILYYQRPLKAPKYNIGKCTYESRTFKKEDKKIREYIPAVAKSHPLFQEFRLWQWIKNLKIYEKLSSDNCTDFFLTNEQDFENLFEFLWNKKEIDHKGILEYLVKTKFPDLKPKQVKTKVKEYRWNYVYDHEKDESKTYPCGETYFLLKNKLDKIYNAQDDFLDKERLYNLWHIIYSVTDKKQYEKALAKFALKNHLDTKSFVNTFKRIPPFKNDYAIYSLKAIKKLLPLMRVGKYWNYDDIDPITKQKIQCIITGEENDTISTLVREKTNHFSNENDFKNLPLWLAGYIVYNSHNESSEIEKWKSPQDIDTFLKKFKQHALRNPIVEQVVTETLRVVRDIWSKKGQGKKDFFNEIHIELGKDLKNPVDKRRKLSSTNTKNESTNTRIKALLIELFTQGVENVKPNSPKHQEILKIFEEGALNSGIEIEEDIIKISNTDQPTKKQLELYILWLEHKYKSPYTGQSIPLSKLFTPNYEIEHIIPRSKYYDDNLSNKVICETEINRLKNNQLGYEFINNHEIREVTLEEGKTIRLLSPEQYWNFVTTYYAKNKAKRENLLLKELPVQMVEKQLNDTRYVSKYVMQLLSKIVRKEDGTDNGINSTNILSISGKMTRALKNDWDLNDVWNDLLLYRFERLNTITKTNLFTTYSEQKQKRMPIVPDQYAKGFHKKRLDHRHHALDAIVIACITRNHINYMNNQNIQGEKLKKNAIEKENYREILQKSRLDIRAQLCEKKYNDNDPTKYNWVFIKPWADFTENTKDILESIIPSFKQNLRIINKTVNYYEKYNENGKKVKVRQIKGDNWAIRKPLHKETISGKVHLSYKTPAKGKILTATRKVLDSSMDFKSIEKITDTGIQKILKNYLEYKKSPELAFSPEGIEELNATITKYNNGFHHKPIYKVRIYEEGVKFPLGNKGNKKSKYVEAEKGTNLFFAIYKDQENNRYFETIPFNDVLETLKKGMSAVPEKNQEENTLVFALSPQDLVFVPTLDEIENPDIVDFKNLTKDQTNRIYKMVSSSGKQCFFIKAEVATSIVNKMEFSTSNKMENSIEGIQIKSNCWKLKLDRLGTITRVIK

SEQ ID NO: 236 - protein, 1389 aa, Oenococcus kitaharae
MARDYSVGLDIGTSSVGWAAIDNKYHLIRAKSKNLIGVRLFDSAVTAEKRRGYRTTRRRLSRRHWRLRLLNDIFAGPLTDFGDENFLARLKYSWVHPQDQSNQAHFAAGLLFDSKEQDKDFYRKYPTIYHLRLALMNDDQKHDLREVYLAIHHLVKYRGHFLIEGDVKADSAFDVHTFADAIQRYAESNNSDENLLGKIDEKKLSAALTDKHGSKSQRAETAETAFDILDLQSKKQIQAILKSVVGNQANLMAIFGLDSSAISKDEQKNYKFSFDDADIDEKIADSEALLSDTEFEFLCDLKAAFDGLTLKMLLGDDKTVSAAMVRRFNEHQKDWEYIKSHIRNAKNAGNGLYEKSKKFDGINAAYLALQSDNEDDRKKAKKIFQDEISSADIPDDVKADFLKKIDDDQFLPIQRTKNNGTIPHQLHRNELEQIIEKQGIYYPFLKDTYQENSHELNKITALINFRVPYYVGPLVEEEQKIADDGKNIPDPTNHWMVRKSNDTITPWNLSQVVDLDKSGRRFIERLTGTDTYLIGEPTLPKNSLLYQKFDVLQELNNIRVSGRRLDIRAKQDAFEHLFKVQKTVSATNLKDFLVQAGYISEDTQIEGLADVNGKNFNNALTTYNYLVSVLGREFVENPSNEELLEEITELQTVFEDKKVLRRQLDQLDGLSDHNREKLSRKHYTGWGRISKKLLTTKIVQNADKIDNQTFDVPRMNQSIIDTLYNTKMNLMEIINNAEDDFGVRAWIDKQNTTDGDEQDVYSLIDELAGPKEIKRGIVQSFRILDDITKAVGYAPKRVYLEFARKTQESHLTNSRKNQLSTLLKNAGLSELVTQVSQYDAAALQNDRLYLYFLQQGKDMYSGEKLNLDNLSNYDIDHIIPQAYTKDNSLDNRVLVSNITNRRKSDSSNYLPALIDKMRPFWSVLSKQGLLSKHKFANLTRTRDFDDMEKERFIARSLVETRQIIKNVASLIDSHFGGETKAVAIRSSLTADMRRYVDIPKNRDINDYHHAFDALLFSTVGQYTENSGLMKKGQLSDSAGNQYNRYIKEWIHAARLNAQSQRVNPFGFVVGSMRNAAPGKLNPETGEITPEENADWSIADLDYLHKVMNFRKITVTRRLKDQKGQLYDESRYPSVLHDAKSKASINFDKHKPVDLYGGFSSAKPAYAALIKFKNKFRLVNVLRQWTYSDKNSEDYILEQIRGKYPKAEMVLSHIPYGQLVKKDGALVTISSATELHNFEQLWLPLADYKLINTLLKTKEDNLVDILHNRLDLPEMTIESAFYKAFDSILSFAFNRYALHQNALVKLQAHRDDFNALNYEDKQQTLERILDALHASPASSDLKKINLSSGFGRLFSPSHFTLADTDEFIFQSVTGLFSTQKTVAQLYQETK

SEQ ID NO: 237 - protein, 1425 aa, Prevotella micans
MIQKIFGLDLGTNSIGSSVRNLELGENLTEQLEFFSSDIFGSSVSKNSNGREYSLAGNRSAHRRSRGLNEARRRKLWATLDLLIEHGLCPMSPDSLMQWRTYDKQKGLYRQYPIEDKDFNAWIMLDFNGDGKPDYSSPYQLRRELVVRQFDFDQPIERYKLGRALYHIAQHRGFKSSKGETIADQEKNEKKPIAEEGADIANEMKASETKLSKGLVAYMQENHLKTVGEAFAKLEDERVRIRNNESYRAIRSQYQDEIKEIFTYQKKLSVESELYERLTSEKKGVGTIFYKRPLRSQRGNVGKCTLERNKPRCPIGRPEFEEFRAWTLINNIKIRETAGEPYKQLPIKLRQELLKDCFLSKVKADFKFEDIRKYIEKRLGLSFSNDDKTINYKDSVSIAACPVTVRMKKLLGENWANCRIDGEKRRQAHGKNNNNEHIVSYTEEDIWHVCYNAEDPEEVSNFARKALHWDENKIKELVRLWTSIPQGYAMLSLKAIRNINRMLLLGLKYSDAVLLAKLPDIVPVSDEDILAITKEFLQLEDKLNQEKQINNIVNSLIANYKSKLEENRFADHNYQYQLGEGDDEDINTQIKSHIGAKLWVQIGADEQTKIFQAVRSKYQDFFKSYKRKFVESPKLGELLVAFLTEKFPNVKSKQWERLYHPSQIAIYRPIPVDNDRSKLRLGNPNIGAIKNPTVMRVLNTLRRRVNQLLDDGVISPDETRVVVETARELNDANTKWALDRYNRIRRDENEKIRKILKELNPTTNSISEQDIDKARYIFEQCETDFYTDGKVPYYNKDIKKYKLWLEQGGQCLYTGQTINLTNLFNPNAFDMEHTIPKSISFDNSDQNLTLCESYYNRFIKKNNIPTDMPNYDKDVTINGKEYTAIKPRLQRWKERVDRLSRNVDFWKGQARRAQDKDRKDECIREKHLWDMELAYWKGKLERFTMTDVTDGFKNSQLVDTRVITRHAVLYLKSIFNHVEVQRGETTAEFRKILGLQSIDEKKDRSLHSHHAIDATMLTVIPSAAKRDRMLELFYKIEETKKALKNYNDNNKTGLNLELKGLEEKLDKEKKDCRVGRRVNDLDRFINENIIVSHHTKDQALTPAHRRLRKRGKIVGGKEHPRWQTGDSLRGEIHKASYYGAITQFAKDANGKVLMKDGQAQIDPTIYYVIRRELKYKRSTQDSGFTNWEDLEKVIVDTDLFGLMKGQFPEGTSFKDACEQGFYMIKKGKNGEGDVKTHRIRHVRCKAVKTALRIKEQTYKSSKDYKQFFYAAVGDLYVMCYYTDGKKRDFKIYSLYDISNHRKSGTEDIPKFITDKKGNHLPLDYKLRTGDMVLLYKDNPEELKDLDQVNLKRRLYKVNRFESEGLIILLTHHLSTTTERGCSIGKIENYQNLPTAIRCGIKTIKFLIMGKHRDFVIRNGNIEFKH

SEQ ID NO: 238 - protein, 1473 aa, Mucilaginibacter paludis
MKNILGLDLGTNSIGWALIEKDTDQKNGNILGTGSRIIPMSQDIKDEFGKGNSISQTADRTKFRSVRRLRERHLLRRERLHRVLNVLGFLPKHYADQIDFKKRLGKLVNETEPKLVYDNKNFIFKKSFEAMLSDFNQHQPLLLADGKKVPFDWTIYYLRKKALTEKIEKEELAWLILNFNQKRGYYQLRGEEEEENPNKMVAFHSLKIVEVIADESQKGKAETWYSLILENGWIYRRSSKTPLYDWKGKQRDFIVTTDLNDDGSIKTDKEGLEKRSFRAPVEDDWTLVKKKTEQEINRSHKTVGTYIYENLLQDPKQKIKGKLVRTIEREFYKDELKMILKNQQKFHPELNDEHLYINCVRELYRNNQAHQTILSKKDFVHLFIDDIIFYQRPLRSQKSSISNCTLEFRKYKNENGTDQTDYLKAIPKSHPLFQEFRLWQWIYNLGIYQKEDDTNVTDELIKNIDGYQDLFDFLNNKKEIRQDILIKFLVEQTGLKGKPLSSVVAKYRWNFVEDKIYPCNETGTQIRTRLAKVENTPEDFLTAETEIKLWHIIYSVNDKADYEKALKTFAEKHNLDTHSFVENFKKFPPFKSEYGSFSEKAIKKLLPLIRLGKYWSWENIDKKTQERIEKILTGEFDEAIKSRVRDKAIHLTEEDHFQGLQLWLASYVVYGRHSEADNLDKWHTVADLEDYLAEFRQHSLRNPIVEQVITETLRVVKDIWLQYGQGAKDFFSEIHIELAREMKNTGDERKRLTSLVTDNENTNLRIKVLLSELLNDGNVENVRPYSPMQQEALKIFEDGVLNSDIEIEDDILKISKMAQPTNTELKRYKLWLEQKYRSPYTGQIIPLNRLFTADYEIEHIIPQSRFFDDSFSNKIICESAVNQLKDKQLGLEFIKNHSGTIVKLGMGKTAKILDVESYNEFVKGNYTKNISKRNKLMLEEIPDKMIERQLNDTRYISKFIISALSNIVRSESNDDGFNSKNVLPGNGKITSRLKQDWGMNDIWNELILPRFERMNKITDSAVFTAWNENNQKFLPIVPLEFSKGFQKKRIDHRHHALDALVIAASTREHINLLNNEHAKSDKRFDLNRKLRKFEKVAYNDPKTGKRIEKEVPTIFLKPWETFTVDAKNSLESIIVSFKQNLRVINRATNYSESYNDENGALRLGKDGNPLKEKIKQSKGDSWAIRKPMHKDFVYGKVHLQNVKLPKDKFITAIRKSLDVTFDLKRIETITDTGIQKILKNYLHSKENKVELAFSPEGIEDMNQHIERYNDGKKHQPIHKVRVFEIGSRFSLGESGNKKTKFVEAAKGTNLFFAVYQDDNKGKRNYETIPLNIVIERQKLGLHSVPTEDAKGGKLLFHLSPNDMVYVPTSEELEDNLASVNIKRLNTAQRKRIYKVEKASGVECYFIRQDIAYLIKNYDAKTKIGELESQNKLQTTMTDDRLKITDVCVKLNIDRLGSIAETFLGNQYGASKKT

SEQ ID NO: 239 - protein, 1365 aa, Filifactor alocis
MTKEYYLGLDVGTNSVGWAVTDSQYNLCKFKKKDMWGIRLFESANTAKDRRLQRGNRRRLERKKQRIDLLQEIFSPEICKIDPTFFIRLNESRLHLEDKSNDFKYPLFIEKDYSDIEYYKEFPTIFHLRKHLIESEEKQDIRLIYLALHNIIKTRGHFLIDGDLQSAKQLRPILDTFLLSLQEEQNLSVSLSENQKDEYEEILKNRSIAKSEKVKKLKNLFEISDELEKEEKKAQSAVIENFCKFIVGNKGDVCKFLRVSKEELEIDSFSFSEGKYEDDIVKNLEEKVPEKVYLFEQMKAMYDWNILVDILETEEYISFAKVKQYEKHKTNLRLLRDIILKYCTKDEYNRMFNDEKEAGSYTAYVGKLKKNNKKYWIEKKRNPEEFYKSLGKLLDKIEPLKEDLEVLTMMIEECKNHTLLPIQKNKDNGVIPHQVHEVELKKILENAKKYYSFLTETDKDGYSVVQKIESIFRFRIPYYVGPLSTRHQEKGSNVWMVRKPGREDRIYPWNMEEIIDFEKSNENFITRMTNKCTYLIGEDVLPKHSLLYSKYMVLNELNNVKVRGKKLPTSLKQKVFEDLFENKSKVTGKNLLEYLQIQDKDIQIDDLSGFDKDFKTSLKSYLDFKKQIFGEEIEKESIQNMIEDIIKWITIYGNDKEMLKRVIRANYSNQLTEEQMKKITGFQYSGWGNFSKMFLKGISGSDVSTGETFDIITAMWETDNNLMQILSKKFTFMDNVEDFNSGKVGKIDKITYDSTVKEMFLSPENKRAVWQTIQVAEEIKKVMGCEPKKIFIEMARGGEKVKKRTKSRKAQLLELYAACEEDCRELIKEIEDRDERDFNSMKLFLYYTQFGKCMYSGDDIDINELIRGNSKWDRDHIYPQSKIKDDSIDNLVLVNKTYNAKKSNELLSEDIQKKMHSFWLSLLNKKLITKSKYDRLTRKGDFTDEELSGFIARQLVETRQSTKAIADIFKQIYSSEVVYVKSSLVSDFRKKPLNYLKSRRVNDYHHAKDAYLNIVVGNVYNKKFTSNPIQWMKKNRDTNYSLNKVFEHDVVINGEVIWEKCTYHEDTNTYDGGTLDRIRKIVERDNILYTEYAYCEKGELFNATIQNKNGNSTVSLKKGLDVKKYGGYFSANTSYFSLIEFEDKKGDRARHIIGVPIYIANMLEHSPSAFLEYCEQKGYQNVRILVEKIKKNSLLIINGYPLRIRGENEVDTSFKRAIQLKLDQKNYELVRNIEKFLEKYVEKKGNYPIDENRDHITHEKMNQLYEVLLSKMKKFNKKGMADPSDRIEKSKPKFIKLEDLIDKINVINKMLNLLRCDNDTKADLSLIELPKNAGSFVVKKNTIGKSKIILVNQSVTGLYENRREL

SEQ ID NO: 240 - protein, 1130 aa, Streptococcus macedonicus
MTNGKILGLDIGIASVGVGIIEAKTGKVVHANSRLFSAANAENNAERRGFRGSRRLNRRKKHRVKRVRDLFEKYGIVTDFRNLNLNPYELRVKGLTEQLTNEELFAALRTISKRRGISYLDDAEDDSTGSTDYAKSIDENRRLLKTKTPGQIQLERLEKYGQLRGNFTVYDENGEAHRLINVFSTSDYEKEARKILETQADYNKKITAEFIDDYVEILTQKRKYYHGPGNEKSRTDYGRFRTDGTTLENIFGILIGKCNFYPDEYRASKASYTAQEYNFLNDLNNLKVPTETGKLSTEQKESLVEFAKNTAILGPAKLLKEIAKILDCKVDEIKGYREDDKGKPDLHTFEPYRKLKFNLDSVNIDYLSREVLDKLADILTLNTEREGIEDAIKRNLPNQFTEEQISEIINVRKSQSTAFNKGWHSFSAKLMNELIPELYATSDEQMTILTRLEKFKVKKKSSKNIKTIDEKEITDEIYNPVVAKSVRQTIKIINAAVKKYGDFDKIVIEMPRDKNADDEKKFINKRNKENKKEKDDALKRAAYLYNGTDKLPDEVFHGNKQLETKIRLWYQQGERCLYSGKPIPIQELVHNSNNFEIDHILPLSLSFDDSLANKVLVYSWTNQEKGQKTPYQVIDSMDAAWSFREMKEYVLKQKGLGKKKRDYLLTTENIDKIEVKKKFIERNLVDTRYASRVVLNSLQSALRELGKDTKVSVVRGQFTSQLRRKWKIDKSRETYHHHAVDALIIAASSQLKLWEKQDNPMFVDYGNNQVVDKQTGEILSVSDNEYKELVFQPPYQGFVNTISSKGFEDEILFSYQVDSKYNRKVSDATIYSTRKAKIGKDKKEETYVLGKIKDIYSQNGFDTFVKKYNKDKTQFLMYQKDPLTWENVIEVILGDYPTTKKSEDGKNDVKCNPFEEYRRENGLICKYSKKGKGTPIKSLKYYDKKLGNCIDITPEESRNKVILQSINPWRADVYFNPETLKYELMGLKYSDLSFEKGTGNYHISQEKYDAIKEKEGIGKKSEFKFTLYRNDLILIKDIASGEQEIYRFLSRTMPNVNHYVELKPYDKEKFDNVQELVEALGEADKVGRCIKSLNKPNISIYKVRTDVLGNKYFVKKEGDKPKLDFKNNKK

SEQ ID NO: 241 - protein, 1367 aa, Streptococcus pyogenes
MDKKYSIGLDIGTNSVGWAVITDDYKVPSKKFKVLGNTDRHSIKKNLIGALLFGSGETAEATRLKRTARRRYTRRKNRICYLQEIFSNEMAKVDDSFFHRLEESFLVEEDKKHERHPIFGNIVDEVAYHEKYPTIYHLRKKLADSTDKADLRLIYLALAHMIKFRGHFLIEGDLNPDNSDVDKLFIQLVQIYNQLFEENPINASRVDAKAILSARLSKSRRLENLIAQLPGEKRNGLFGNLIALSLGLTPNFKSNFDLAEDAKLQLSKDTYDDDLDNLLAQIGDQYADLFLAAKNLSDAILLSDILRVNSEITKAPLSASMIKRYDEHHQDLTLLKALVRQQLPEKYKEIFFDQSKNGYAGYIDGGASQEEFYKFIKPILEKMDGTEELLVKLNREDLLRKQRTFDNGSIPHQIHLGELHAILRRQEDFYPFLKDNREKIEKILTFRIPYYVGPLARGNSRFAWMTRKSEETITPWNFEEVVDKGASAQSFIERMTNFDKNLPNEKVLPKHSLLYEYFTVYNELTKVKYVTEGMRKPAFLSGEQKKAIVDLLFKTNRKVTVKQLKEDYFKKIECFDSVEISGVEDRFNASLGAYHDLLKIIKDKDFLDNEENEDILEDIVLTLTLFEDRGMIEERLKTYAHLFDDKVMKQLKRRRYTGWGRLSRKLINGIRDKQSGKTILDFLKSDGFANRNFMQLIHDDSLTFKEDIQKAQVSGQGHSLHEQIANLAGSPAIKKGILQTVKIVDELVKVMGHKPENIVIEMARENQTTQKGQKNSRERMKRIEEGIKELGSQILKEHPVENTQLQNEKLYLYYLQNGRDMYVDQELDINRLSDYDVDHIVPQSFIKDDSIDNKVLTRSDKNRGKSDNVPSEEVVKKMKNYWRQLLNAKLITQRKFDNLTKAERGGLSELDKAGFIKRQLVETRQITKHVAQILDSRMNTKYDENDKLIREVKVITLKSKLVSDFRKDFQFYKVREINNYHHAHDAYLNAVVGTALIKKYPKLESEFVYGDYKVYDVRKMIAKSEQEIGKATAKYFFYSNIMNFFKTEITLANGEIRKRPLIETNGETGEIVWDKGRDFATVRKVLSMPQVNIVKKTEVQTGGFSKESILPKRNSDKLIARKKDWDPKKYGGFDSPTVAYSVLVVAKVEKGKSKKLKSVKELLGITIMERSSFEKNPIDFLEAKGYKEVKKDLIIKLPKYSLFELENGRKRMLASAGELQKGNELALPSKYVNFLYLASHYEKLKGSPEDNEQKQLFVEQHKHYLDEIIEQISEFSKRVILADANLDKVLSAYNKHRDKPIREQAENIIHLFTLTNLGAPAAFKYFDTTIDRKRYTSTKEVLDATLIHQSITGLYETRIDLSQLGGD

SEQ ID NO: 242 - protein, 1233 aa, Mycoplasma canis
MEKKRKVTLGFDLGIASVGWAIVDSETNQVYKLGSRLFDAPDTNLERRTQRGTRRLLRRRKYRNQKFYNLVKRTEVFGLSSREAIENRFRELSIKYPNIIELKTKALSQEVCPDEIAWILHDYLKNRGYFYDEKETKEDFDQQTVESMPSYKLNEFYKKYGYFKGALSQPTESEMKDNKDLKEAFFFDFSNKEWLKEINYFFNVQKNILSETFIEEFKKIFSFTRDISKGPGSDNMPSPYGIFGEFGDNGQGGRYEHIWDKNIGKCSIFTNEQRAPKYLPSALIFNFLNELANIRLYSTDKKNIQPLWKLSSVDKLNILLNLFNLPISEKKKKLTSTNINDIVKKESIKSIMISVEDIDMIKDEWAGKEPNVYGVGLSGLNIEESAKENKFKFQDLKILNVLINLLDNVGIKFEFKDRNDIIKNLELLDNLYLFLIYQKESNNKDSSIDLFIAKNESLNIENLKLKLKEFLLGAGNEFENHNSKTHSLSKKAIDEILPKLLDNNEGWNLEAIKNYDEEIKSQIEDNSSLMAKQDKKYLNDNFLKDAILPPNVKVTFQQAILIFNKIIQKFSKDFEIDKVVIELAREMTQDQENDALKGIAKAQKSKKSLVEERLEANNIDKSVFNDKYEKLIYKIFLWISQDFKDPYTGAQISVNEIVNNKVEIDHIIPYSLCFDDSSANKVLVHKQSNQEKSNSLPYEYIKQGHSGWNWDEFTKYVKRVFVNNVDSILSKKERLKKSENLLTASYDGYDKLGFLARNLNDTRYATILFRDQLNNYAEHHLIDNKKMFKVIAMNGAVTSFIRKNMSYDNKLRLKDRSDFSHHAYDAAIIALFSNKTKTLYNLIDPSLNGIISKRSEGYWVIEDRYTGEIKELKKEDWTSIKNNVQARKIAKEIEEYLIDLDDEVFFSRKTKRKTNRQLYNETIYGIATKTDEDGITNYYKKEKFSILDDKDIYLRLLREREKFVINQSNPEVIDQIIEIIESYGKENNIPSRDEAINIKYTKNKINYNLYLKQYMRSLTKSLDQFSEEFINQMIANKTFVLYNPTKNTTRKIKFLRLVNDVKINDIRKNQVINKFNGKNNEPKAFYENINSLGAIVFKNSANNFKTLSINTQIAIFGDKNWDIEDFKTYNMEKIEKYKEIYGIDKTYNFHSFIFPGTILLDKQNKEFYYISSIQTVRDIIEIKFLNKIEFKDENKNQDTSKTPKRLMFGIKSIMNNYEQVDISPFGINKKIFE

SEQ ID NO: 243 - protein, 1375 aa, Lactobacillus johnsonii
MTKIKDDYIVGLDIGTDSCGWVAMNSNNDILKLQGKTAIGSRLFEGGKSAAERRLFRTTHRRIKRRRWRLKLLEEFFDPYMAEVDPYFFARLKESGLSPLDKRKTVSSIVFPTSAEDKKFYDDYPTIYHLRYKLMTEDEKFDLREVYLAIHHIIKYRGNFLYNTSVKDFKASKIDVKSSIEKLNELYENLGLDLNVEFNISNTAEIEKVLKDKQIFKRDKVKKIAELFAIKTDNKEQSKRIKDISKQVANAVLGYKTRFDTIALKEISKDELSDWNFKLSDIDADSKFEALMGNLDENEQAILLTIKELFNEVTLNGIVEDGNTLSESMINKYNDHRDDLKLLKEVIENHIDRKKAKELALAYDLYVNNRHGQLLQAKKKLGKIKPRSKEDFYKVVNKNLDDSRASKEIKKKIELDSFMPKQRTNANGVIPYQLQQLELDKIIENQSKYYPFLKEINPVSSHLKEAPYKLDELIRFRVPYYVGPLISPNESTKDIQTKKNQNFAWMIRKEEGRITPWNFDQKVDRIESANKFIKRMTTKDTYLFGEDVLPANSLLYQKFTVLNELNNIRINGKRISVDLKQEIYENLFKKHTTVTVKKLENYLKENHNLVKVEIKGLADEKKFNSGLTTYNRFKNLNIFDNQIDDLKYRNDFEKIIEWSTIFEDKSIYKEKLRSIDWLNEKQINALSNIRLQGWGRLSKKLLAQLHDHNGQTIIEQLWDSQNNFMQIVTQADFKDAIAKANQNLLVATSVEDILNNAYTSPANKKAIRQVIKVVDDIVKAASGKVPKQIAIEFTRDADENPKRSQTRGSKLQKVYKDLSTELASKTIAEELNEAIKDKKLVQDKYYLYFMQLGRDAYTGEPINIDEIQKYDIDHILPQSFIKDDALDNRVLVSRAVNNGKSDNVPVKLFGNEMAANLGMTIRKMWEEWKNIGLISKTKYNNLLTDPDHINKYKSAGFIRRQLVETSQIIKLVSTILQSRYPNTEIITVKAKYNHYLREKFDLYKSREVNDYHHAIDAYLSAICGNLLYQNYPNLRPFFVYGQYKKFSSDPDKEKAIFNKTRKFSFISQLLKNKSENSKEIAKKLKRAYQFKYMLVSRETETRDQEMFKMTVYPRFSHDTVKAPRNLIPKKMGMSPDIYGGYTNNSDAYMVIVRIDKKKGTEYKILGIPTRELVNLKKAEKEDHYKSYLKEILTPRILYNKNGKRDKKITSFEIVKSKIPYKQVIQDGDKKFMLGSSTYVYNAKQLTLSTESMKAITNNFDKDSDENDALIKAYDEILDKVDKYLPLFDINKFREKLHSGREKFIKLSLEDKKDTILKVLEGLHDNAVMTKIPTIGLSTPLGFMQFPNGVILSENAKLIYQSPTGLFKKSVKISDL

SEQ ID NO: 244 - protein, 1053 aa, Staphylococcus aureus
MKRNYILGLDIGITSVGYGIIDYETRDVIDAGVRLFKEANVENNEGRRSKRGARRLKRRRRHRIQRVKKLLFDYNLLTDHSELSGINPYEARVKGLSQKLSEEEFSAALLHLAKRRGVHNVNEVEEDTGNELSTKEQISRNSKALEEKYVAELQLERLKKDGEVRGSINRFKTSDYVKEAKQLLKVQKAYHQLDQSFIDTYIDLLETRRTYYEGPGEGSPFGWKDIKEWYEMLMGHCTYFPEELRSVKYAYNADLYNALNDLNNLVITRDENEKLEYYEKFQIIENVFKQKKKPTLKQIAKEILVNEEDIKGYRVTSTGKPEFTNLKVYHDIKDITARKEIIENAELLDQIAKILTIYQSSEDIQEELTNLNSELTQEEIEQISNLKGYTGTHNLSLKAINLILDELWHTNDNQIAIFNRLKLVPKKVDLSQQKEIPTTLVDDFILSPVVKRSFIQSIKVINAIIKKYGLPNDIIIELAREKNSKDAQKMINEMQKRNRQTNERIEEIIRTTGKENAKYLIEKIKLHDMQEGKCLYSLEAIPLEDLLNNPFNYEVDHIIPRSVSFDNSFNNKVLVKQEENSKKGNRTPFQYLSSSDSKISYETFKKHILNLAKGKGRISKTKKEYLLEERDINRFSVQKDFINRNLVDTRYATRGLMNLLRSYFRVNNLDVKVKSINGGFTSFLRRKWKFKKERNKGYKHHAEDALIIANADFIFKEWKKLDKAKKVMENQMFEEKQAESMPEIETEQEYKEIFITPHQIKHIKDFKDYKYSHRVDKKPNRELINDTLYSTRKDDKGNTLIVNNLNGLYDKDNDKLKKLINKSPEKLLMYHHDPQTYQKLKLIMEQYGDEKNPLYKYYEETGNYLTKYSKKDNGPVIKKIKYYGNKLNAHLDITDDYPNSRNKVVKLSLKPYRFDVYLDNGVYKFVTVKNLDVIKKENYYEVNSKCYEEAKKLKKISNQAEFIASFYNNDLIKINGELYRVIGVNNDLLNRIEVNMIDITYREYLENMNDKRPPRIIKTIASKTQSIKKYSTDILGNLYEVKSKKHPQIIKKG

SEQ ID NO: 245 - protein, 1063 aa, Simonsiella muelleri
MEKFHYVLGLDLGIASVGWAAIEIDKETETSIGLLDCGVRTFERAEVPKTGDSLAKARREARSTRRLIRRRSHRLLRLKRLLKREIFRQPETFKDLPINAWQLRVKGLDSRLNEYEWAAVLLHLVKHRGYLSQRKSEMSETDSKSEMGRLLAGVAENHQLLQQEQYRTPAELALKKFVKHFRNKGGDYAHTFNRLDLQAELHLLFQKQRELGNPFTSPELERQVDDLLMTQRSALQGDAILKMLGHCGFEPEQFKAAKNTFSAERFIWLTKLNNLRIQDQGKERALTADERTKLLDEPYKKSKLTYAQVRKLLSLPQTAIFKGLRYDLEHDKKAENSTLMEMKSYHNIRQTLEKSGLKTEWQSIATQPEILDAIGTAFSIYKTDEDISHELKTCRLPENVLNELLKNINFDGFIQLSLTALRKILPLMEQGYRYDEACTQIYGNHHSGSLQQESKQFLPHIPIDDVRNPVVFRTLTQARKVVNAIIRRYGSPARVHIEMARELGKSKSDRDRIEKQQQKNKKERENAVAKFKEDFPDFVGEPRGKDILKMRLYEQQHGKCLYSGHDIDINRLNEKGYVEIDHALPFSRTWDDSQNNKVLVLGSENQNKRNQTPDEYLDGANNSQRWLEFQARVQTCHFSYGKKQRIQLAKLDDETEKGFLERNLNDTRYIARFMCQFVQENLYLTGKGKRLVFASNGGMTATLRNLWGLRKVREDNDRHHALDAIVVACSTASMQQKITKAFQRHESIEYVDTETGEVKFRIPQPWDFFRQEVMIRVFSDQPCEDLVEKLSARPEALHDNVTPLFVSRAPNRKMSGQGHLETIKSAKRLSEENSMVKKPLTTLKLKDIPEIVGYPSREPQLYAALKTRLETHDDDPIKAFAKPFYKPNKNGELGALVRSVRVKGVQNTGVMVHDGKGIADNATMVRVDVYTKAGKNYLVPVYVWQVAQGILPNRAVTSGKSEADWDLIDESFEFKFSLSRGDLVEMISNKGRIFGYYNGLDRANGSIGIREHDLEKSKGKDGVHRVGVKTATAFNKYHVDPLGKEIHRCSSEPRPTLKIKSKK

SEQ ID NO: 246 - protein, 1509 aa, Psychroflexus torquis
MKRILGLDLGTNSIGWSLIEHDFKNKQGQIEGLGVRIIPMSQEILGKFDAGQSISQTADRTKYRGVRRLYQRDNLRRERLHRVLKILDFLPKHYSESIDFQDKVGQFKPKQEVKLNYRKNEKNKHEFVFMNSFIEMVSEFKNAQPELFYNKGNGEETKIPYDWTLYYLRKKALTQQITKEELAWLILNFNQKRGYYQLRGEDIDEDKNKKYMQLKVNNLIDSGAKVKGKVLYNVIFDNGWKYEKQIVNKDEWEGRTKEFIITTKTLKNGNIKRTYKAVDSEIDWAAIKAKTEQDINKANKTVGEYIYESLLDNPSQKIRGKLVKTIERKFYKEEFEKLLSKQIELQPELFNESLYKACIKELYPRNENHQSNNKKQGFEYLFTEDIIFYQRPLKSQKSNISGCQFEHKIYKQKNKKTGKLELIKEPIKTISRSHPLFQEFRIWQWLQNLKIYNKEKIENGKLEDVTTQLLPNNEAYVTLFDFLNTKKELEQKQFIEYFVKKKLIDKKEKEHFRWNFVEDKKYPFSETRAQFLSRLAKVKGIKNTEDFLNKNTQVGSKENSPFIKRIEQLWHIIYSVSDLKEYEKALEKFAEKHNLEKDSFLKNFKKFPPFVSDYASYSKKAISKLLPIMRMGKYWSESAVPTQVKERSLSIMERVKVLPLKEGYSDKDLADLLSRVSDDDIPKQLIKSFISFKDKNPLKGLNTYQANYLVYGRHSETGDIQHWKTPEDIDRYLNNFKQHSLRNPIVEQVVMETLRVVRDIWEHYGNNEKDFFKEIHVELGREMKSPAGKREKLSQRNTENENTNHRIREVLKELMNDASVEGGVRDYSPSQQEILKLYEEGIYQNPNTNYLKVDEDEILKIRKKNNPTQKEIQRYKLWLEQGYISPYTGKIIPLTKLFTHEYQIEHIIPQSRYYDNSLGNKIICESEVNEDKDNKTAYEYLKVEKGSIVFGHKLLNLDEYEAHVNKYFKKNKTKLKNLLSEDIPEGFINRQLNDSRYISKLVKGLLSNIVRENGEQEATSKNLIPVTGVVTSKLKQDWGLNDKWNEIIAPRFKRLNKLTNSNDFGFWDNDINAFRIQVPDSLIKGFSKKRIDHRHHALDALVVACTSRNHTHYLSALNAENKNYSLRDKLVIKNENGDYTKTFQIPWQGFTIEAKNNLEKTVVSFKKNLRVINKTNNKFWSYKDENGNLNLGKDGKPKKKLRKQTKGYNWAIRKPLHKETVSGIYNINAPKNKIATSVRTLLTEIKNEKHLAKITDLRIRETILPNHLKHYLNNKGEANFSEAFSQGGIEDLNKKITTLNEGKKHQPIYRVKIFEVGSKFSISEDENSAKSKKYVEAAKGTNLFFAIYLDEENKKRNYETIPLNEVITHQKQVAGFPKSERLSVQPDSQKGTFLFTLSPNDLVYVPNNEELENRDLFNLGNLNVEQISRIYKFTDSSDKTCNFIPFQVSKLIFNLKKKEQKKLDVDFIIQNEFGLGSPQSKNQKSIDDVMIKEKCIKLKIDRLGNISKA

SEQ ID NO: 247 - protein, 1112 aa, Staphylococcus simulans
MLVGLKFKQSILFENMENAEDIKESATGSDAISLSDDYYENLSEFLTDEQLNFIESANTFFMGIMLDRILKGATSISAAKVRDYKIFKSQLKLIKDIVYQNKYDKYHEFFVTSKEDMRAYQENPDAKNFGKLSKFDQYLIHSKDQYAKLMKDLKGLVPKEYTEVLNLIDEQKFLVVQNTTDNASIPYQNNVFEAENILRNQQKYYPEITEEMIGKVINLISFRIPYYVGPLTNKNGQSDFAWMIRKSDEQTLPWNFDKVIDKSKSAEKFIRRMTSKCTYLLEEDVLPKHSLLYQEMEVLNELNNVQLRGENEPKHRIHRLDPKVKQFIYHNLFQKKKNVTHKDLITLLQNSEHRNTLNKTSGQKLKVFGTQNDSKFASKLSTYNDMKAILGSVENKRQMIEELVLWITIFEDKAILKQKIGEKYPNITEKQLNQIVKLNYSGWGRLSEKLLTKEVNGRSLIDLMYSTENNFMEIITDKTLGFDCFIKNSNKVKNAKISYKDVAELRTSPALKKGIWNAIKMVREISNLFGAPEKIIIEFATEDQAKGKRQKSRSELWDDLVKKNNLKRNKEFEGLFEELKAYPDLDFSNPKLWLYIHQNGKCMYTKKPIDLERLMSDTNNQLYEIDHILPRTFVKDDSINNKVLVIQSANQKKSGDKMPLEIFDNHVLVPFWKMLYENDLISSSKLSKLMKKEFNDLDKEGFIQRQLVETRQIISHVSDFLTEEYPSTTVVPMKANVVSELRRKFDIPKIRQLNDWHHAVDAYLNGFVYQAARVFYPKVNLFEFNFKWEKVREKWRQLGEFTENNKKREFFLFKRMENYVNEYGEGMISKLIFDLDNFKFNYSRKVESTESAFYKQSAFSPKNTTAQYDSDKNKTAIYKEMKNKRGIVVSYTYVKKDQELIGYGVFNETVFEYVNNADVDMNTRALKIVRKAFPKLDIKKAQYLFSINKGDALLVNGHPFLFVSAYERINGKQLEFDIAMQRKIKQALSPYNNMTEQEKVEFYNQFAEKVIEEFRNSIGLQSRDRKVNLIKNLFNNTEKSNDSMTQSILEVLKMTKVSAERSKELKIRWNGQTPNTFIDTKNNAEIQYKSITGLKTTKPKSIFKLAESKNEL

SEQ ID NO: 248 - protein, 1274 aa, Mycoplasma gallisept
MNINMNNSIKSKPEVTIGLDLGVGSVGWAIVDNETNIIHHLGSRLFSQAKTAEDRRSFRGVRRLIRRRKYKLKRFVNLIWKYNSYFGFKNKEDILNNYQEQQKLHNTVLNLKLEALNAKIDPKALSWILHDYLKNRGHFYEDNRDFNVYPTEELANYFDEFGYYKGIIDSKNDDDDKLEEGLTKYKFSNQHWLEEVKKVLSNQTGLPEKFKEEYESLFSYVRNYSEGPGSINSVSPYGIYHLDEKEGKVVQKYNNIWDKTIGKCSIFPDEYRAPKNSPIAMIFNEINELSTIRSYSIYLTGWFINQEFKKAYLNKLLDLLIKTNSEKPIDARQFKKLREETIAESIGKETLKDVESEEKLEKDDHKWKLKGLKLNTNGKIQYNDLSSLAKFVHKLKQHLKLDFLLEDQYTPLDKINFLQSLYVYLGKHLRYSNRVDSANLKEFSDSSRLFERVLQEQKDGLFKLFEQTDKDDEKILTQTHSLSTKAMLLAITRMTNLDNDEDNQKNNDKGWNFEAIKNFDQKFIDITKTNNNLSLKQDKRYLDDQFINDAILSPGVKRILREATKVFNAILKQFSEEYDVTKVVIELARELSEEKELENTKNYKKLIKKNGDKISEGLKALGIAEDKIEEILKSPTKSYKVLLWLQQDHIDPYSQKEIAFDDILTKTEKTEIDHIIPYSISFDDSSSNKLLVLAESNQAKSNQTPYEFINSGKAEITWEVYEAYCHKFKNGDSSLLDSTQRSKKFAKMMKTDTSSKYDIGFLARNLNDTRYATIVFRDALKDYANNHLVEDKPMFKVVCINGGVTSFLRKNFDPKSWYAKKDRDKNIHHAVDASIISIFSNETKTLFNQLTKFADYKLFKNTDGSWKKIDPKTGVVSEVTDENWKQIRVRNQVSEIAKVIDKYIQDSNIERKARYSRKIENKTNISLFNDTVYSAKKVGYEDQIKRKNLKTLDIHESAEENKNSKVKKQFVYRKLVNVSLLNNDKLADLFAEKEDILMYRANPWVINLAEQIFNEYTENKKIKSQNVFEKYMLDLTKEFPEKFSEAFVKSMIRNKTAIIYNVEKDVVHRIKRLKILSSELKENKWSNVIIRSKNESGTKLSYQDTINSIALMIMRSIDPTAKKQYIRVPLNTLNLHLGDQDFDLHNIDAYLKKPKFVKYLKANEIGDEYKPWRVLTSGTLLIHKKDKKLMYISSFQNLNDLIEIKNLIETEYKENVDSDPKKKKKASQILRSLSVILNDYILLDAKYNFDILGLSKNKIDEILNSKLDLDKIAK

SEQ ID NO: 249 - protein, 1122 aa, Artificial Sequence; identical to SEQ ID NO: 18
  Synthetic sequence

SEQ ID NO: 250 - protein, 1236 aa, Artificial Sequence; identical to SEQ ID NO: 16
  Synthetic sequence

SEQ ID NO: 251 - protein, 1059 aa, Artificial Sequence; identical to SEQ ID NO: 10
  Synthetic sequence

SEQ ID NO: 252 - protein, 1166 aa, Artificial Sequence; identical to SEQ ID NO: 34
  Synthetic sequence

SEQ ID NO: 253 - protein, 1149 aa, Artificial Sequence; identical to SEQ ID NO: 32
  Synthetic sequence

SEQ ID NO: 254 - protein, 1314 aa, Artificial Sequence; identical to SEQ ID NO: 22
  Synthetic sequence

SEQ ID NO: 255 - protein, 1064 aa, Artificial Sequence; identical to SEQ ID NO: 33
  Synthetic sequence

SEQ ID NO: 256 - protein, 1401 aa, Artificial Sequence
  Synthetic sequence
MDKKYSIGLDIGTNSVGWAVITDEYKVPSKKFKVLGNTDRHSIKKNLIGALLFDSGETAEATRLKRTARRRYTRRKNRICYLQEIFSNEMAKVDDSFFHRLEESFLVEEDKKHERHPIFGNIVDEVAYHEKYPTIYHLRKKLVDSTDKADLRLIYLALAHMIKFRGHFLIEGDLNPDNSDVDKLFIQLVQTYNQLFEENPINASGVDAKAILSARLSKSRRLENLIAQLPGEKKNGLFGNLIALSLGLTPNFKSNFDLAEDAKLQLSKDTYDDDLDNLLAQIGDQYADLFLAAKNLSDAILLSDILRVNTEITKAPLSASMIKRYDEHHQDLTLLKALVRQQLPEKYKEIFFDQSKNGYAGYIDGGASQEEFYKFIKPILEKMDGTEELLVKLNREDLLRKQRTFDNGSIPHQIHLGELHAILRRQEDFYPFLKDNREKIEKILTFRIPYYVGPLARGNSRFAWMTRKSEETITPWNFEEVVDKGASAQSFIERMTNFDKNLPNEKVLPKHSLLYEYFTVYNELTKVKYVTEGMRKPAFLSGEQKKAIVDLLFKTNRKVTVKQLKEDYFKKIECFDSVEISGVEDRFNASLGTYHDLLKIIKDKDFLDNEENEDILEDIVLTLTLFEDREMIEERLKTYAHLFDDKVMKQLKRRRYTGWGRLSRKLINGIRDKQSGKTILDFLKSDGFANRNFMQLIHDDSLTFKEDIQKAQVSGQGDSLHEHIANLAGSPAIKKGILQTVKVVDELVKVMGRHKPENIVIEMARENQTTQKGQKNSRERMKRIEEGIKELGSQILKEHPVENTQLQNEKLYLYYLQNGRDMYVDQELDINRLSDYDVDHIVPQSFLKDDSIDNKVLTRSDKNRGKSDNVPSEEVVKKMKNYWRQLLNAKLITQRKFDNLTKAERGGLSELDKAGFIKRQLVETRQITKHVAQILDSRMNTKYDENDKLIREVKVITLKSKLVSDFRKDFQFYKVREINNYHHAHDAYLNAVVGTALIKKYPKLESEFVYGDYKVYDVRKMIAKSEQEIGKATAKYFFYSNIMNFFKTEITLANGEIRKRPLIETNGETGEIVWDKGRDFATVRKVLSMPQVNIVKKTEVQTGGFSKESILPKRNSDKLIARKKDWDPKKYGGFDSPTVAYSVLVVAKVEKGKSKKLKSVKELLGITIMERSSFEKNPIDFLEAKGYKEVKKDLIIKLPKYSLFELENGRKRMLASAGELQKGNELALPSKYVNFLYLASHYEKLKGSPEDNEQKQLFVEQHKHYLDEIIEQISEFSKRVILADANLDKVLSAYNKHRDKPIREQAENIIHLFTLTNLGAPAAFKYFDTTIDRKRYTSTKEVLDATLIHQSITGLYETRIDLSQLGGDAYPYDVPDYASLGSGSPKKKRKVEDPKKKRKVD

SEQ ID NO: 257 - protein, 1368 aa, Artificial Sequence
  Synthetic sequence
MDKKYSIGLAIGTNSVGWAVITDDYKVPSKKLKGLGNTDRHGIKKNLIGALLFDSGETAEATRLKRTARRRYTRRKNRICYLQEIFSNEMAKVDDSFFHRLEESFLVEEDKKHERHPIFGNIVDEVAYHEKYPTIYHLRKKLADSTDKVDLRLIYLALAHMIKFRGHFLIEGDLNPDNSDVDKLFIQLVQTYNQLFEENPINASRVDAKAILSARLSKSRRLENLIAQLPGEKKNGLFGNLIALSLGLTPNFKSNFDLAEDAKLQLSKDTYDDDLDNLLAQIGDQYADLFLAAKNLSDATLLSDILRVNSEITKAPLSASMIKRYDEHHQDLTLLKALVRQQLPEKYKEIFFDQSKNGYAGYIDGGASQEEFYKFIKPILEKMDGTEELLAKLNREDLLRKQRTFDNGSIPYQIHLGELHAILRRQEDFYPFLKDNREKIEKILTFRIPYYVGPLARGNSRFAWMTRKSEETITPWNFEEVVDKGASAQSFIERMTNFDKNLPNEKVLPKHSLLYEYFTVYNELTKVKYVTEGMRKPAFLSGEQKKAIVDLLFKTNRKVTVKQLKEDYFKKIECFDSVEISGVEDRFNASLGTYHDLLKIIKDKDFLDNEENEDILEDIVLTLTLFEDREMIEERLKTYAHLFDDKVMKQLKRRRYTGWGRLSRKLINGIRDKQSGKTILDFLKSDGFANRNFMQLIHDDSLTFKEDIQKAQVSGQGDSLHEHIANLAGSPAIKKGILQTVKVVDELVKVMGRHKPENIVIEMARENQTTQKGQKNSRERMKRIEEGIKELGSDILKEYPVENTQLQNEKLYLYYLQNGRDMYVDQELDINRLSDYDVDHIVPQSFLKDDSIDNKVLTRSDKNRGKSDNVPSEEVVKKMKNYWRQLLNAKLITQRKFDNLTKAERGGLSELDKVGFIKRQLVETRQITKHVAQILDSRMNTKYDENDKLIREVRVITLKSKLVSDFRKDFQFYKVREINNYHHAHDAYLNAVVGTALIKKYPKLESEFVYGDYKVYDVRKMIAKSEQEIGKATAKYFFYSNIMNFFKTEITLANGEIRKRPLIETNGETGEIVWDKGRDFATVRKVLSMPQVNIVKKTEVQTGGFSKESILPKRNSDKLIARKKDWDPKKYGGFDSPTVAYSVLVVAKVEKGKSKKLKSVKELLGITIMERSSFEKDPIDFLEAKGYKEVRKDLIIKLPKYSLFELENGRKRMLASAGELQKGNELALPSKYVNFLYLASHYEKLKGSPEDNEQKQLFVEQHKHYLDEIIEQISEFSKRVILADANLDKVLSAYNKHRDKPIREQAENIIHLFTLTNLGAPAAFKYFDTTIDRKRYTSTKEVLDATLIHQSITGLYETRIDLSQLGGD

SEQ ID NO: 258 - protein, 1368 aa, Artificial Sequence
  Synthetic sequence
MDKKYSIGLDIGTNSVGWAVITDDYKVPSKKLKGLGNTDRHGIKKNLIGALLFDSGETAEATRLKRTARRRYTRRKNRICYLQEIFSNEMAKVDDSFFHRLEESFLVEEDKKHERHPIFGNIVDEVAYHEKYPTIYHLRKKLADSTDKVDLRLIYLALAHMIKFRGHFLIEGDLNPDNSDVDKLFIQLVQTYNQLFEENPINASRVDAKAILSARLSKSRRLENLIAQLPGEKKNGLFGNLIALSLGLTPNFKSNFDLAEDAKLQLSKDTYDDDLDNLLAQIGDQYADLFLAAKNLSDATLLSDILRVNSEITKAPLSASMIKRYDEHHQDLTLLKALVRQQLPEKYKEIFFDQSKNGYAGYIDGGASQEEFYKFIKPILEKMDGTEELLAKLNREDLLRKQRTFDNGSIPYQIHLGELHAILRRQEDFYPFLKDNREKIEKILTFRIPYYVGPLARGNSRFAWMTRKSEETITPWNFEEVVDKGASAQSFIERMTNFDKNLPNEKVLPKHSLLYEYFTVYNELTKVKYVTEGMRKPAFLSGEQKKAIVDLLFKTNRKVTVKQLKEDYFKKIECFDSVEISGVEDRFNASLGTYHDLLKIIKDKDFLDNEENEDILEDIVLTLTLFEDREMIEERLKTYAHLFDDKVMKQLKRRRYTGWGRLSRKLINGIRDKQSGKTILDFLKSDGFANRNFMQLIHDDSLTFKEDIQKAQVSGQGDSLHEHIANLAGSPAIKKGILQTVKVVDELVKVMGRHKPENIVIEMARENQTTQKGQKNSRERMKRIEEGIKELGSDILKEYPVENTQLQNEKLYLYYLQNGRDMYVDQELDINRLSDYDVDAIVPQSFLKDDSIDNKVLTRSDKNRGKSDNVPSEEVVKKMKNYWRQLLNAKLITQRKFDNLTKAERGGLSELDKVGFIKRQLVETRQITKHVAQILDSRMNTKYDENDKLIREVRVITLKSKLVSDFRKDFQFYKVREINNYHHAHDAYLNAVVGTALIKKYPKLESEFVYGDYKVYDVRKMIAKSEQEIGKATAKYFFYSNIMNFFKTEITLANGEIRKRPLIETNGETGEIVWDKGRDFATVRKVLSMPQVNIVKKTEVQTGGFSKESILPKRNSDKLIARKKDWDPKKYGGFDSPTVAYSVLVVAKVEKGKSKKLKSVKELLGITIMERSSFEKDPIDFLEAKGYKEVRKDLIIKLPKYSLFELENGRKRMLASAGELQKGNELALPSKYVNFLYLASHYEKLKGSPEDNEQKQLFVEQHKHYLDEIIEQISEFSKRVILADANLDKVLSAYNKHRDKPIREQAENIIHLFTLTNLGAPAAFKYFDTTIDRKRYTSTKEVLDATLIHQSITGLYETRIDLSQLGGD

SEQ ID NO: 259 - protein, 1368 aa, Artificial Sequence
  Synthetic sequence
MDKKYSIGLAIGTNSVGWAVITDDYKVPSKKLKGLGNTDRHGIKKNLIGALLFDSGETAEATRLKRTARRRYTRRKNRICYLQEIFSNEMAKVDDSFFHRLEESFLVEEDKKHERHPIFGNIVDEVAYHEKYPTIYHLRKKLADSTDKVDLRLIYLALAHMIKFRGHFLIEGDLNPDNSDVDKLFIQLVQTYNQLFEENPINASRVDAKAILSARLSKSRRLENLIAQLPGEKKNGLFGNLIALSLGLTPNFKSNFDLAEDAKLQLSKDTYDDDLDNLLAQIGDQYADLFLAAKNLSDATLLSDILRVNSEITKAPLSASMIKRYDEHHQDLTLLKALVRQQLPEKYKEIFFDQSKNGYAGYIDGGASQEEFYKFIKPILEKMDGTEELLAKLNREDLLRKQRTFDNGSIPYQIHLGELHAILRRQEDFYPFLKDNREKIEKILTFRIPYYVGPLARGNSRFAWMTRKSEETITPWNFEEVVDKGASAQSFIERMTNFDKNLPNEKVLPKHSLLYEYFTVYNELTKVKYVTEGMRKPAFLSGEQKKAIVDLLFKTNRKVTVKQLKEDYFKKIECFDSVEISGVEDRFNASLGTYHDLLKIIKDKDFLDNEENEDILEDIVLTLTLFEDREMIEERLKTYAHLFDDKVMKQLKRRRYTGWGRLSRKLINGIRDKQSGKTILDFLKSDGFANRNFMQLIHDDSLTFKEDIQKAQVSGQGDSLHEHIANLAGSPAIKKGILQTVKVVDELVKVMGRHKPENIVIEMARENQTTQKGQKNSRERMKRIEEGIKELGSDILKEYPVENTQLQNEKLYLYYLQNGRDMYVDQELDINRLSDYDVDAIVPQSFLKDDSIDNKVLTRSDKNRGKSDNVPSEEVVKKMKNYWRQLLNAKLITQRKFDNLTKAERGGLSELDKVGFIKRQLVETRQITKHVAQILDSRMNTKYDENDKLIREVRVITLKSKLVSDFRKDFQFYKVREINNYHHAHDAYLNAVVGTALIKKYPKLESEFVYGDYKVYDVRKMIAKSEQEIGKATAKYFFYSNIMNFFKTEITLANGEIRKRPLIETNGETGEIVWDKGRDFATVRKVLSMPQVNIVKKTEVQTGGFSKESILPKRNSDKLIARKKDWDPKKYGGFDSPTVAYSVLVVAKVEKGKSKKLKSVKELLGITIMERSSFEKDPIDFLEAKGYKEVRKDLIIKLPKYSLFELENGRKRMLASAGELQKGNELALPSKYVNFLYLASHYEKLKGSPEDNEQKQLFVEQHKHYLDEIIEQISEFSKRVILADANLDKVLSAYNKHRDKPIREQAENIIHLFTLTNLGAPAAFKYFDTTIDRKRYTSTKEVLDATLIHQSITGLYETRIDLSQLGGD

SEQ ID NO: 260 - protein, 15 aa, Artificial Sequence
  Synthetic sequence
IGLDIGTNSVGWAVI

SEQ ID NO: 261 - protein, 8 aa, Artificial Sequence
  Synthetic sequence
IVIEMARE

SEQ ID NO: 262 - protein, 27 aa, Artificial Sequence
  Synthetic sequence
DVDHIVPQSFLKDDSIDNKVLTRSDKN

SEQ ID NO: 263 - protein, 8 aa, Artificial Sequence
  Synthetic sequence
HHAHDAYL

SEQ ID NO: 264 - protein, 11 aa, Artificial Sequence
  Synthetic sequence
YGRKKRRQRRR

SEQ ID NO: 265 - protein, 12 aa, Artificial Sequence
  Synthetic sequence
RRQRRTSKLMKR

SEQ ID NO: 266 - protein, 27 aa, Artificial Sequence
  Synthetic sequence
GWTLNSAGYLLGKINLKALAALAKKIL

SEQ ID NO: 267 - protein, 33 aa, Artificial Sequence
  Synthetic sequence
KALAWEAKLAKALAKALAKHLAKALAKALKCEA

SEQ ID NO: 268 - protein, 16 aa, Artificial Sequence
  Synthetic sequence
RQIKIWFQNRRMKWKK

SEQ ID NO: 269 - protein, 9 aa, Artificial Sequence
  Synthetic sequence
RKKRRQRRR

SEQ ID NO: 270 - protein, 8 aa, Artificial Sequence
  Synthetic sequence
RKKRRQRR

SEQ ID NO: 271 - protein, 11 aa, Artificial Sequence
  Synthetic sequence
YARAAARQARA

SEQ ID NO: 272 - protein, 11 aa, Artificial Sequence
  Synthetic sequence
THRLPRRRRRR

SEQ ID NO: 273 - protein, 11 aa, Artificial Sequence
  Synthetic sequence
GGRRARRRRRR

SEQ ID NO: 274 - protein, 13 aa, Artificial Sequence
  Synthetic sequence
DAYPYDVPDYASL

SEQ ID NO: 275 - protein, 17 aa, Artificial Sequence
  Synthetic sequence
PKKKRKVEDPKKKRKVD

SEQ ID NO: 276 - DNA, 4206 bp, Artificial Sequence
  Synthetic sequence
atggacaagaagtacagcatcggcctggacatcggcaccaactctgtgggctgggccgtgatcaccgacgagtacaaggtgcccagcaagaaattcaaggtgctgggcaacaccgaccggcacagcatcaagaagaacctgatcggcgccctgctgttcgacagcggagaaacagccgaggccacccggctgaagagaaccgccagaagaagatacaccagacggaagaaccggatctgctatctgcaagagatcttcagcaacgagatggccaaggtggacgacagcttcttccacagactggaagagtccttcctggtggaagaggataagaagcacgagcggcaccccatcttcggcaacatcgtggacgaggtggcctaccacgagaagtaccccaccatctaccacctgagaaagaaactggtggacagcaccgacaaggccgacctgcggctgatctatctggccctggcccacatgatcaagttccggggccacttcctgatcgagggcgacctgaaccccgacaacagcgacgtggacaagctgttcatccagctggtgcagacctacaaccagctgttcgaggaaaaccccatcaacgccagcggcgtggacgccaaggccatcctgtctgccagactgagcaagagcagacggctggaaaatctgatcgcccagctgcccggcgagaagaagaatggcctgttcggcaacctgattgccctgagcctgggcctgacccccaacttcaagagcaacttcgacctggccgaggatgccaaactgcagctgagcaaggacacctacgacgacgacctggacaacctgctggcccagatcggcgaccagtacgccgacctgtttctggccgccaagaacctgtccgacgccatcctgctgagcgacatcctgagagtgaacaccgagatcaccaaggcccccctgagcgcctctatgatcaagagatacgacgagcaccaccaggacctgaccctgctgaaagctctcgtgcggcagcagctgcctgagaagtacaaagagattttcttcgaccagagcaagaacggctacgccggctacatcgatggcggagccagccaggaagagttctacaagttcatcaagcccatcctggaaaagatggacggcaccgaggaactgctcgtgaagctgaacagagaggacctgctgcggaagcagcggaccttcgacaacggcagcatcccccaccagatccacctgggagagctgcacgccattctgcggcggcaggaagatttttacccattcctgaaggacaaccgggaaaagatcgagaagatcctgaccttccgcatcccctactacgtgggccctctggccaggggaaacagcagattcgcctggatgaccagaaagagcgaggaaaccatcaccccctggaacttcgaggaagtggtggacaagggcgccagcgcccagagcttcatcgagcggatgaccaacttcgataagaacctgcccaacgagaaggtgctgcccaagcacagcctgctgtacgagtacttcaccgtgtacaacgagctgaccaaagtgaaatacgtgaccgagggaatgagaaagcccgccttcctgagcggcgagcagaaaaaagccatcgtggacctgctgttcaagaccaaccggaaagtgaccgtgaagcagctgaaagaggactacttcaagaaaatcgagtgcttcgactccgtggaaatctccggcgtggaagatcggttcaacgcctccctgggcacataccacgatctgctgaaaattatcaaggacaaggacttcctggacaatgaggaaaacgaggacattctggaagatatcgtgctgaccctgacactgtttgaggacagagagatgatcgaggaacggctgaaaacctatgcccacctgttcgacgacaaagtgatgaagcagctgaagcggcggagatacaccggctggggcaggctgagccggaagctgatcaacggcatccgggacaagcagtccggcaagacaatcctggatttcctgaagtccgacggcttcgccaacagaaacttcatgcagctgatccacgacgacagcctgacctttaaagaggacatccagaaagcccaggtgtccggccagggcgatagcctgcacgagcacattgccaatctggccggcagccccgccattaagaagggcatcctgcagacagtgaaggtggtggacgagctcgtgaaagtgatgggccggcacaagcccgagaacatcgtgatcgaaatggccagagagaaccagaccacccagaagggacagaagaacagccgcgagagaatgaagcggatcgaagagggcatcaaagagctgggcagccagatcctgaaagaacaccccgtggaaaacacccagctgcagaacgagaagctgtacctgtactacctgcagaatgggcgggatatgtacgtggaccaggaactggacatcaaccggctgtccgactacgatgtggaccatatcgtgcctcagagctttctgaaggacgactccatcgataacaaagtgctgactcggagcgacaagaaccggggcaagagcgacaacgtgccctccgaagaggtcgtgaagaagatgaagaactactggcgccagctgctgaatgccaagctgattacccagaggaagttcgacaatctgaccaaggccgagagaggcggcctgagcgaactggataaggccggcttcatcaagagacagctggtggaaacccggcagatcacaaagcacgtggcacagatcctggactcccggatgaacactaagtacgacgagaacgacaaactgatccgggaagtgaaagtgatcaccctgaagtccaagctggtgtccgatttccggaaggatttccagttttacaaagtgcgcgagatcaacaactaccaccacgcccacgacgcctacctgaacgccgtcgtgggaaccgccctgatcaaaaagtaccctaagctggaaagcgagttcgtgtacggcgactacaaggtgtacgacgtgcggaagatgatcgccaagagcgagcaggaaatcggcaaggctaccgccaagtacttcttctacagcaacatcatgaactttttcaagaccgagattaccctggccaacggcgagatccggaagcggcctctgatcgagacaaacggcgaaacaggcgagatcgtgtgggataagggccgggactttgccaccgtgcggaaagtgctgtctatgccccaagtgaatatcgtgaaaaagaccgaggtgcagacaggcggcttcagcaaagagtctatcctgcccaagaggaacagcgacaagctgatcgccagaaagaaggactgggaccctaagaagtacggcggcttcgacagccccaccgtggcctattctgtgctggtggtggccaaagtggaaaagggcaagtccaagaaactgaagagtgtgaaagagctgctggggatcaccatcatggaaagaagcagcttcgagaagaatcccatcgactttctggaagccaagggctacaaagaagtgaaaaaggacctgatcatcaagctgcctaagtactccctgttcgagctggaaaacggccggaagagaatgctggcctctgccggcgaactgcagaagggaaacgaactggccctgccctccaaatatgtgaacttcctgtacctggccagccactatgagaagctgaagggctcccccgaggataatgagcagaaacagctgtttgtggaacagcacaaacactacctggacgagatcatcgagcagatcagcgagttctccaagagagtgatcctggccgacgctaatctggacaaggtgctgagcgcctacaacaagcacagagacaagcctatcagagagcaggccgagaatatcatccacctgtttaccctgaccaatctgggagcccctgccgccttcaagtactttgacaccaccatcgaccggaagaggtacaccagcaccaaagaggtgctggacgccaccctgatccaccagagcatcaccggcctgtacgagacacggatcgacctgtctcagctgggaggcgacgcctatccctatgacgtgcccgattatgccagcctgggcagcggctcccccaagaaaaaacgcaaggtggaagatcctaagaaaaagcggaaagtggactga

SEQ ID NO: 277 - protein, 1401 aa, Artificial Sequence; identical to SEQ ID NO: 256
  Synthetic sequence

SEQ ID NO: 278 - DNA, 50 bp, Artificial Sequence
  Synthetic sequence
ttatatgaacataactcaatttgtaaaaaagggtattggggaattcatta

SEQ ID NO: 279 - DNA, 50 bp, Artificial Sequence
  Synthetic sequence
taatgaattccccaatacccttttttacaaattgagttatgttcatataa

SEQ ID NO: 280 - RNA, 42 nt, Artificial Sequence
  Synthetic sequence
auaacucaauuuguaaaaaaguuuuagagcuaugcuguuuug

SEQ ID NO: 281 - DNA, 27 bp, Artificial Sequence
  Synthetic sequence
aacataactcaatttgtaaaaaagggt

SEQ ID NO: 282 - DNA, 27 bp, Artificial Sequence
  Synthetic sequence
acccttttttacaaattgagttatgtt

SEQ ID NO: 283 - RNA, 25 nt, Artificial Sequence
  Synthetic sequence
auaacucaauuuguaaaaaaguuuu

SEQ ID NO: 284 - DNA, 23 bp, Artificial Sequence
  Synthetic sequence
agcataactcaatttgtaaaaaa

SEQ ID NO: 285 - DNA, 23 bp, Artificial Sequence
  Synthetic sequence
aacataactcaatctgtaaaaaa

SEQ ID NO: 286 - DNA, 23 bp, Artificial Sequence
  Synthetic sequence
aacataactcaatttgaaaaaaa

SEQ ID NO: 287 - DNA, 23 bp, Artificial Sequence
  Synthetic sequence
aacataactcaatttgttaaaaa

SEQ ID NO: 288 - DNA, 23 bp, Artificial Sequence
  Synthetic sequence
aacataactcaatttgtataaaa

SEQ ID NO: 289 - DNA, 23 bp, Artificial Sequence
  Synthetic sequence
aacataactcaatttgtaataaa

SEQ ID NO: 290 - DNA, 23 bp, Artificial Sequence
  Synthetic sequence
aacataactcaatttgtaaataa

SEQ ID NO: 291 - DNA, 27 bp, Artificial Sequence
  Synthetic sequence
aacataactcaatttgtaaaaaatggc

SEQ ID NO: 292 - DNA, 27 bp, Artificial Sequence
  Synthetic sequence
gccattttttacaaattgagttatgtt

SEQ ID NO: 293 - DNA, 20 bp, Artificial Sequence
  Synthetic sequence
tattgagttaaagtaaaaaa

SEQ ID NO: 294 - DNA, 20 bp, Artificial Sequence
  Synthetic sequence
tattgagttattgtaaaaaa

SEQ ID NO: 295 - DNA, 20 bp, Artificial Sequence
  Synthetic sequence
tattgagtatttgtaaaaaa

SEQ ID NO: 296 - DNA, 20 bp, Artificial Sequence
  Synthetic sequence
tattgacaatttgtaaaaaa

SEQ ID NO: 297 - DNA, 20 bp, Artificial Sequence
  Synthetic sequence
tattctcaatttgtaaaaaa

SEQ ID NO: 298 - DNA, 20 bp, Artificial Sequence
  Synthetic sequence
taaactcaatttgtaaaaaa

SEQ ID NO: 299 - RNA, 62 nt, Artificial Sequence
  Synthetic sequence
aaaaauuaggugcgcuuggcguuuuagagcuagaaauagcaaguuaaaauaaggcuaguccg

SEQ ID NO: 300 - RNA, 54 nt, Artificial Sequence
  Synthetic sequence
aaaaauuaggugcgcuuggcguuuuagagcuagaaauagcaaguuaaaauaagg

SEQ ID NO: 301 - DNA, 50 bp, Artificial Sequence
  Synthetic sequence
tgcgctggttgatttcttcttgcgctttttgggtattggggaattcatta

SEQ ID NO: 302 - DNA, 50 bp, Artificial Sequence
  Synthetic sequence
taatgaattccccaatacccaaaaagcgcaagaagaaatcaaccagcgca

SEQ ID NO: 303 - RNA, 42 nt, Artificial Sequence
  Synthetic sequence
gauuucuucuugcgcuuuuuguuuuagagcuaugcuguuuug

SEQ ID NO: 304 - DNA, 50 bp, Artificial Sequence
  Synthetic sequence
ggttatattaagtgccgaggaaaaattaggtgcgcttggctggcgcatta

SEQ ID NO: 305 - DNA, 50 bp, Artificial Sequence
  Synthetic sequence
taatgcgccagccaagcgcacctaatttttcctcggcacttaatataacc

SEQ ID NO: 306 - RNA, 42 nt, Artificial Sequence
  Synthetic sequence
aaaaauuaggugcgcuuggcguuuuagagcuaugcuguuuug

SEQ ID NO: 307 - DNA, 50 bp, Artificial Sequence
  Synthetic sequence
tacgctggttgatttcttcttgcgcttttttggctttttcgagttcggct

SEQ ID NO: 308 - DNA, 50 bp, Artificial Sequence
  Synthetic sequence
agccgaactcgaaaaagccaaaaaagcgcaagaagaaatcaaccagcgta

SEQ ID NO: 309 - RNA, 42 nt, Artificial Sequence; identical to SEQ ID NO: 303
  Synthetic sequence

SEQ ID NO: 310 - DNA, 14 bp, Artificial Sequence
  Synthetic sequence
taatgcgccagcca

SEQ ID NO: 311 - RNA, 42 nt, Artificial Sequence; identical to SEQ ID NO: 306
  Synthetic sequence

SEQ ID NO: 312 - DNA, 25 bp, Artificial Sequence
  Synthetic sequence
ataactcaatttgtaaaaaagggta

SEQ ID NO: 313 - DNA, 25 bp, Artificial Sequence
  Synthetic sequence
ataactcaatttgtaaaaaagcgta

SEQ ID NO: 314 - DNA, 25 bp, Artificial Sequence
  Synthetic sequence
ataactcaatttgtaaaaaagccta

SEQ ID NO: 315 - DNA, 26 bp, Artificial Sequence
  Synthetic sequence
aaaaattaggtgcgcttggctggcgc

SEQ ID NO: 316 - DNA, 26 bp, Artificial Sequence
  Synthetic sequence
aaaaattaggtgcgcttggctcgcgc

SEQ ID NO: 317 - DNA, 26 bp, Artificial Sequence
  Synthetic sequence
aaaaattaggtgcgcttggctgccgc

SEQ ID NO: 318 - DNA, 26 bp, Artificial Sequence
  Synthetic sequence
aaaaattaggtgcgcttggctggccc

SEQ ID NO: 319 - DNA, 26 bp, Artificial Sequence
  Synthetic sequence
aaaaattaggtgcgcttggctccccc

SEQ ID NO: 320 - DNA, 21 bp, Artificial Sequence
  Synthetic sequence
aaaaattaggtgcgcttggct

SEQ ID NO: 321 - RNA, 62 nt, Artificial Sequence
  Synthetic sequence
gauuucuucuugcgcuuuuuguuuuagagcuagaaauagcaaguuaaaauaaggcuaguccg

SEQ ID NO: 322 - RNA, 54 nt, Artificial Sequence
  Synthetic sequence
gauuucuucuugcgcuuuuuguuuuagagcuagaaauagcaaguuaaaauaagg

SEQ ID NO: 323 - RNA, 62 nt, Artificial Sequence
  Synthetic sequence
auaacucaauuuguaaaaaaguuuuagagcuagaaauagcaaguuaaaauaaggcuaguccg

SEQ ID NO: 324 - RNA, 54 nt, Artificial Sequence
  Synthetic sequence
auaacucaauuuguaaaaaaguuuuagagcuagaaauagcaaguuaaaauaagg

SEQ ID NO: 325 - DNA, 120 bp, Artificial Sequence
  Synthetic sequence
gtcccaattcttgttgaattagatggtgatgttaatgggcacaaattttctgtcagtggagagggtgaaggtgatgcaacatacggaaaacttacccttaaatttatttgcactactgga

SEQ ID NO: 326 - DNA, 120 bp, Artificial Sequence
  Synthetic sequence
tccagtagtgcaaataaatttaagggtaagttttccgtatgttgcatcaccttcaccctctccactgacagaaaatttgtgcccattaacatcaccatctaattcaacaagaattgggac

SEQ ID NO: 327 - DNA, 26 bp, Artificial Sequence
  Synthetic sequence
ccaattcttgttgaattagatggtga

SEQ ID NO: 328 - DNA, 26 bp, Artificial Sequence
  Synthetic sequence
aattagatggtgatgttaatgggcac

SEQ ID NO: 329 - DNA, 26 bp, Artificial Sequence
  Synthetic sequence
aaattttctgtcagtggagagggtga

SEQ ID NO: 330 - DNA, 26 bp, Artificial Sequence
  Synthetic sequence
catctaattcaacaagaattgggaca

SEQ ID NO: 331 - DNA, 26 bp, Artificial Sequence
  Synthetic sequence
cagtagtgcaaataaatttaagggta

SEQ ID NO: 332 - RNA, 68 nt, Artificial Sequence
  Synthetic sequence
ccaauucuuguugaauuagauggugaguuuuagagcuagaaauagcaaguuaaaauaaggcuaguccg

SEQ ID NO: 333 - RNA, 68 nt, Artificial Sequence
  Synthetic sequence
aauuagauggugauguuaaugggcacguuuuagagcuagaaauagcaaguuaaaauaaggcuaguccg

SEQ ID NO: 334 - RNA, 68 nt, Artificial Sequence
  Synthetic sequence
aaauuuucugucaguggagagggugaguuuuagagcuagaaauagcaaguuaaaauaaggcuaguccg

SEQ ID NO: 335 - RNA, 68 nt, Artificial Sequence
  Synthetic sequence
caucuaauucaacaagaauugggacaguuuuagagcuagaaauagcaaguuaaaauaaggcuaguccg

SEQ ID NO: 336 - RNA, 68 nt, Artificial Sequence
  Synthetic sequence
caguagugcaaauaaauuuaaggguaguuuuagagcuagaaauagcaaguuaaaauaaggcuaguccg

SEQ ID NO: 337 - DNA, 50 bp, Artificial Sequence
  Synthetic sequence
ggttatattaagtgccgaggaaaaattaggtgcgcttggctgccgcatta

SEQ ID NO: 338 - DNA, 50 bp, Artificial Sequence
  Synthetic sequence
taatgcggcagccaagcgcacctaatttttcctcggcacttaatataacc

SEQ ID NO: 339 - RNA, 42 nt, Artificial Sequence; identical to SEQ ID NO: 306
  Synthetic sequence

SEQ ID NO: 340 - DNA, 59 bp, Artificial Sequence
  Synthetic sequence
gaaattaatacgactcactatagaaaacagcatagcaagttaaaataaagttaaaataa

SEQ ID NO: 341 - DNA, 25 bp, Artificial Sequence
  Synthetic sequence
aaaaaaagcaccgactcggtgccac

SEQ ID NO: 342 - DNA, 66 bp, Artificial Sequence
  Synthetic sequence
gaaattaatacgactcactatagggatttcttcttgcgctttttgttttagagctatgctgttttg

SEQ ID NO: 343 - DNA, 66 bp, Artificial Sequence
  Synthetic sequence
caaaacagcatagctctaaaacaaaaagcgcaagaagaaatccctatagtgagtcgtattaatttc

SEQ ID NO: 344 - DNA, 66 bp, Artificial Sequence
  Synthetic sequence
gaaattaatacgactcactataggataactcaatttgtaaaaaagttttagagctatgctgttttg

SEQ ID NO: 345 - DNA, 66 bp, Artificial Sequence
  Synthetic sequence
caaaacagcatagctctaaaacttttttacaaattgagttatcctatagtgagtcgtattaatttc

SEQ ID NO: 346 - DNA, 51 bp, Artificial Sequence
  Synthetic sequence
gaaattaatacgactcactatagatgatgagaaccgttgctacaataaggc

SEQ ID NO: 347 - DNA, 24 bp, Artificial Sequence
  Synthetic sequence
aaataaacgatgccccttaaagca

SEQ ID NO: 348 - DNA, 68 bp, Artificial Sequence
  Synthetic sequence
gaaattaatacgactcactatagatgataactcaatttgtaaaaaagttgtagctccctttctcattt

SEQ ID NO: 349 - DNA, 68 bp, Artificial Sequence
  Synthetic sequence
aaatgagaaagggagctacaacttttttacaaattgagttatcatctatagtgagtcgtattaatttc

SEQ ID NO: 350 - DNA, 51 bp, Artificial Sequence
  Synthetic sequence
gaaattaatacgactcactatagatgaaataacatagcaagttaaaataag

SEQ ID NO: 351 - DNA, 31 bp, Artificial Sequence
  Synthetic sequence
aaaaaaagcgccgaaacagcgctacttaatt

SEQ ID NO: 352 - DNA, 68 bp, Artificial Sequence
  Synthetic sequence
gaaattaatacgactcactatagatgataactcaatttgtaaaaaagttttagagctatgttattttg

SEQ ID NO: 353 - DNA, 68 bp, Artificial Sequence
  Synthetic sequence
caaaataacatagctctaaaacttttttacaaattgagttatcatctatagtgagtcgtattaatttc

SEQ ID NO: 354 - DNA, 35 bp, Artificial Sequence
  Synthetic sequence
atgcacctgcaggatgctgttaaataattgtatac

SEQ ID NO: 355 - DNA, 36 bp, Artificial Sequence
  Synthetic sequence
atgcacggatccagctgctctaagtctactaaaacc

SEQ ID NO: 356 - DNA, 39 bp, Artificial Sequence
  Synthetic sequence
atgcagggccggccgtgacagagagaaacttgattcaac

SEQ ID NO: 357 - DNA, 39 bp, Artificial Sequence
  Synthetic sequence
atgcagggccggcccttcgtttaagtaaacatcaaagtg

SEQ ID NO: 358 - DNA, 59 bp, Artificial Sequence
  Synthetic sequence
atgagcgataatagaataaagttatatgagcataactcaatttgtaaaaaagggtattg

SEQ ID NO: 359 - DNA, 59 bp, Artificial Sequence
  Synthetic sequence
caatacccttttttacaaattgagttatgctcatataactttattctattatcgctcat

SEQ ID NO: 360 - DNA, 57 bp, Artificial Sequence
  Synthetic sequence
gcgataatagaataaagttatatgaacataactcaatctgtaaaaaagggtattggg

SEQ ID NO: 361 - DNA, 57 bp, Artificial Sequence
  Synthetic sequence
cccaatacccttttttacagattgagttatgttcatataactttattctattatcgc

SEQ ID NO: 362 - DNA, 40 bp, Artificial Sequence
  Synthetic sequence
gaacataactcaatttgaaaaaaagggtattggggaattc

SEQ ID NO: 363 - DNA, 40 bp, Artificial Sequence
  Synthetic sequence
gaattccccaataccctttttttcaaattgagttatgttc

SEQ ID NO: 364 - DNA, 40 bp, Artificial Sequence
  Synthetic sequence
gaacataactcaatttgttaaaaagggtattggggaattc

SEQ ID NO: 365 - DNA, 40 bp, Artificial Sequence
  Synthetic sequence
gaattccccaataccctttttaacaaattgagttatgttc

SEQ ID NO: 366 - DNA, 43 bp, Artificial Sequence
  Synthetic sequence
gaacataactcaatttgtataaaagggtattggggaattcatt

SEQ ID NO: 367 - DNA, 43 bp, Artificial Sequence
  Synthetic sequence
aatgaattccccaatacccttttatacaaattgagttatgttc

SEQ ID NO: 368 - DNA, 43 bp, Artificial Sequence
  Synthetic sequence
gaacataactcaatttgtaataaagggtattggggaattcatt

SEQ ID NO: 369 - DNA, 43 bp, Artificial Sequence
  Synthetic sequence
aatgaattccccaataccctttattacaaattgagttatgttc

SEQ ID NO: 370 - DNA, 40 bp, Artificial Sequence
  Synthetic sequence
cataactcaatttgtaaataagggtattggggaattcatt

SEQ ID NO: 371 - DNA, 40 bp, Artificial Sequence
  Synthetic sequence
aatgaattccccaatacccttatttacaaattgagttatg

SEQ ID NO: 372 - DNA, 46 bp, Artificial Sequence
  Synthetic sequence
cataactcaatttgtaaaaaagcgtattggggaattcattataaag

SEQ ID NO: 373 - DNA, 46 bp, Artificial Sequence
  Synthetic sequence
ctttataatgaattccccaatacgcttttttacaaattgagttatg

SEQ ID NO: 374 - DNA, 44 bp, Artificial Sequence
  Synthetic sequence
cataactcaatttgtaaaaaagcctattggggaattcattataa

SEQ ID NO: 375 - DNA, 44 bp, Artificial Sequence
  Synthetic sequence
ttataatgaattccccaataggcttttttacaaattgagttatg

SEQ ID NO: 376 - DNA, 38 bp, Artificial Sequence
  Synthetic sequence
atgcagggccggccagtatcagcgtacttggatttggg

SEQ ID NO: 377 - DNA, 37 bp, Artificial Sequence
  Synthetic sequence
atgcagggccggccttgtctcactcactctatttttg

SEQ ID NO: 378 - DNA, 30 bp, Artificial Sequence
  Synthetic sequence
gatttcttgcgcttttttggctttttcgag

SEQ ID NO: 379 - DNA, 30 bp, Artificial Sequence
  Synthetic sequence
gggatggcaatccatgggtcaaggtactag

SEQ ID NO: 380 - DNA, 20 bp, Artificial Sequence
  Synthetic sequence
ggaacgaaaactcacgttaa

SEQ ID NO: 381 - DNA, 25 bp, Artificial Sequence
  Synthetic sequence
tgagagtgtcttttcagatgctgtg

SEQ ID NO: 382 - DNA, 21 bp, Artificial Sequence
  Synthetic sequence
agcggtatctgttccccaaaa

SEQ ID NO: 383 - DNA, 21 bp, Artificial Sequence
  Synthetic sequence
gttaaaaaccacgtaaccaca

SEQ ID NO: 384 - RNA, 42 nt, Artificial Sequence; identical to SEQ ID NO: 303
  Synthetic sequence

SEQ ID NO: 385 - RNA, 42 nt, Artificial Sequence; identical to SEQ ID NO: 280
  Synthetic sequence

SEQ ID NO: 386 - RNA, 42 nt, Artificial Sequence; identical to SEQ ID NO: 306
  Synthetic sequence

SEQ ID NO: 387 - RNA, 36 nt, Artificial Sequence
  Synthetic sequence
auaacucaauuuguaaaaaaguuuuagagcuaugcu

SEQ ID NO: 388 - RNA, 32 nt, Artificial Sequence
  Synthetic sequence
auaacucaauuuguaaaaaaguuuuagagcua

SEQ ID NO: 389 - RNA, 22 nt, Artificial Sequence
  Synthetic sequence
uuguaaaaaaguuuuagagcua

SEQ ID NO: 390 - RNA, 89 nt, Artificial Sequence
  Synthetic sequence
guuggaaccauucaaaacagcauagcaaguuaaaauaaggcuaguccguuaucaacuugaaaaaguggcaccgagucggugcuuuuuuu

SEQ ID NO: 391 - RNA, 74 nt, Artificial Sequence
  Synthetic sequence
aacagcauagcaaguuaaaauaaggcuaguccguuaucaacuugaaaaaguggcaccgagucggugcuuuuuuu

SEQ ID NO: 392 - RNA, 67 nt, Artificial Sequence
  Synthetic sequence
uagcaaguuaaaauaaggcuaguccguuaucaacuugaaaaaguggcaccgagucggugcuuuuuuu

SEQ ID NO: 393 - RNA, 39 nt, Artificial Sequence
  Synthetic sequence
aaacagcauagcaaguuaaaauaaggcuaguccguuauc

SEQ ID NO: 394 - RNA, 30 nt, Artificial Sequence
  Synthetic sequence
aaacagcauagcaaguuaaaauaaggcuag

SEQ ID NO: 395 - RNA, 22 nt, Artificial Sequence
  Synthetic sequence
aaacagcauagcaaguuaaaau

SEQ ID NO: 396 - RNA, 31 nt, Artificial Sequence
  Synthetic sequence
uagcaaguuaaaauaaggcuaguccguuauc

SEQ ID NO: 397 - RNA, 26 nt, Artificial Sequence
  Synthetic sequence
uagcaaguuaaaauaaggcuaguccg

SEQ ID NO: 398 - RNA, 22 nt, Artificial Sequence
  Synthetic sequence
uagcaaguuaaaauaaggcuag

SEQ ID NO: 399 - RNA, 26 nt, Artificial Sequence
  Synthetic sequence
guuggaaccauucaaaacagcauagc

SEQ ID NO: 400 - RNA, 62 nt, Artificial Sequence; identical to SEQ ID NO: 321
  Synthetic sequence

SEQ ID NO: 401 - RNA, 54 nt, Artificial Sequence; identical to SEQ ID NO: 322
  Synthetic sequence

SEQ ID NO: 402 - RNA, 62 nt, Artificial Sequence; identical to SEQ ID NO: 323
  Synthetic sequence

SEQ ID NO: 403 - RNA, 54 nt, Artificial Sequence; identical to SEQ ID NO: 324
  Synthetic sequence

SEQ ID NO: 404 - RNA, 62 nt, Artificial Sequence; identical to SEQ ID NO: 299
  Synthetic sequence

SEQ ID NO: 405 - RNA, 54 nt, Artificial Sequence; identical to SEQ ID NO: 300
  Synthetic sequence

SEQ ID NO: 406 - RNA, 62 nt, Artificial Sequence
  Synthetic sequence
ccaauucuuguugaauuagaguuuuagagcuagaaauagcaaguuaaaauaaggcuaguccg

SEQ ID NO: 407 - RNA, 62 nt, Artificial Sequence
  Synthetic sequence
aauuagauggugauguuaauguuuuagagcuagaaauagcaaguuaaaauaaggcuaguccg

SEQ ID NO: 408 - RNA, 62 nt, Artificial Sequence
  Synthetic sequence
aaauuuucugucaguggagaguuuuagagcuagaaauagcaaguuaaaauaaggcuaguccg

SEQ ID NO: 409 - RNA, 62 nt, Artificial Sequence
  Synthetic sequence
caucuaauucaacaagaauuguuuuagagcuagaaauagcaaguuaaaauaaggcuaguccg

SEQ ID NO: 410 - RNA, 61 nt, Artificial Sequence
  Synthetic sequence
caguagugcaaauaaauuuaguuuuagagcuagaaauagcaaguuaaaauaaggcuagccg

SEQ ID NO: 411 - DNA, 50 bp, Artificial Sequence; identical to SEQ ID NO: 302
  Synthetic sequence

SEQ ID NO: 412 - DNA, 50 bp, Artificial Sequence; identical to SEQ ID NO: 301
  Synthetic sequence

SEQ ID NO: 413 - DNA, 50 bp, Artificial Sequence; identical to SEQ ID NO: 279
  Synthetic sequence

SEQ ID NO: 414 - DNA, 50 bp, Artificial Sequence; identical to SEQ ID NO: 278
  Synthetic sequence

SEQ ID NO: 415 - DNA, 50 bp, Artificial Sequence; identical to SEQ ID NO: 305
  Synthetic sequence

SEQ ID NO: 416 - DNA, 50 bp, Artificial Sequence; identical to SEQ ID NO: 304
  Synthetic sequence

SEQ ID NO: 417 - DNA, 50 bp, Artificial Sequence
  Synthetic sequence
taatgaattccccaataggcttttttacaaattgagttatgttcatataa

SEQ ID NO: 418 - DNA, 50 bp, Artificial Sequence
  Synthetic sequence
ttatatgaacataactcaatttgtaaaaaagcctattggggaattcatta

SEQ ID NO: 419 - DNA, 50 bp, Artificial Sequence
  Synthetic sequence
taatgaattcccgttatggcttttttacaaattgagttatgttcatataa

SEQ ID NO: 420 - DNA, 50 bp, Artificial Sequence
  Synthetic sequence
ttatatgaacataactcaatttgtaaaaaagccataacgggaattcatta

SEQ ID NO: 421 - DNA, 50 bp, Artificial Sequence
  Synthetic sequence
taatgcgcgagccaagcgcacctaatttttcctcggcacttaatataacc

SEQ ID NO: 422 - DNA, 50 bp, Artificial Sequence
  Synthetic sequence
ggttatattaagtgccgaggaaaaattaggtgcgcttggctcgcgcatta

SEQ ID NO: 423 - DNA, 50 bp, Artificial Sequence; identical to SEQ ID NO: 338
  Synthetic sequence

SEQ ID NO: 424 - DNA, 50 bp, Artificial Sequence; identical to SEQ ID NO: 337
  Synthetic sequence

SEQ ID NO: 425 - DNA, 74 bp, Artificial Sequence
  Synthetic sequence
tcagtcctcatctccctcaagcaggccccgctggtgcactgaagagccaccctgtggaaacactacatctgcaa

SEQ ID NO: 426 - DNA, 74 bp, Artificial Sequence
  Synthetic sequence
ttgcagatgtagtgtttccacagggtggctcttcagtgcaccagcggggcctgcttgagggagatgaggactga

SEQ ID NO: 427 - DNA, 20 bp, Artificial Sequence
  Synthetic sequence
tgtggaaacactacatctgc

SEQ ID NO: 428 - RNA, 62 nt, Artificial Sequence
  Synthetic sequence
gcagauguaguguuuccacaguuuuagagcuagaaauagcaaguuaaaauaaggcuaguccg

SEQ ID NO: 429 - RNA, 75 nt, Artificial Sequence
  Synthetic sequence
gcagauguaguguuuccacaguuuuagagcuaugcugaaaagcauagcaaguuaaaauaaggcuaguccguuauc

SEQ ID NO: 430 - RNA, 87 nt, Artificial Sequence
  Synthetic sequence
gcagauguaguguuuccacaguuuuagagcuaugcuguuuuggaaacaaaacagcauagcaaguuaaaauaaggcuaguccguuauc

SEQ ID NO: 431 - RNA, 86 nt, Artificial Sequence
  Synthetic sequence
ggaaccauucaaaacagcauagcaaguuaaaauaaggcuaguccguuaucaacuugaaaaaguggcaccgagucggugcuuuuuuu

SEQ ID NO: 432 - RNA, 67 nt, Artificial Sequence; identical to SEQ ID NO: 392
  Synthetic sequence

SEQ ID NO: 433 - RNA, 88 nt, Streptococcus pyogenes
guuggaaccauucaaaacagcauagcaaguuaaaauaaggcuaguccguuaucaacuugaaaaaguggcaccgagucggugcuuuuuu

SEQ ID NO: 434 - RNA, 93 nt, Listeria innocua
auauuguuaguauucaaaauaacauagcaaguuaaaauaaggcuuuguccguuaucaacuuuuaauuaaguagcgcuguuucggcgcuuuuuu

SEQ ID NO: 435 - RNA, 104 nt, Streptococcus mutans
uguuggaaucauucgaaacaacacagcaaguuaaaauaaggcagugauuuuuaauccaguccguacacaacuugaaaaagugcgcaccgauucggugcuuuuuu

SEQ ID NO: 436 - RNA, 95 nt, Streptococcus thermophilus
uugugguuugaaaccauucgaaacaacacagcgaguuaaaauaaggcuuaguccguacucaacuugaaaagguggcaccgauucgguguuuuuuu

SEQ ID NO: 437 - RNA, 118 nt, Streptococcus thermophilus
uaauaauaguguaagggacgccuuacacaguuacuuaaaucuugcagaagcuacaaagauaaggcuucaugccgaaaucaacacccugucauuuuauggcaggguguuuucguuauuu

SEQ ID NO: 438 - RNA, 112 nt, Neisseria meningitidis
cauauugucgcacugcgaaaugagaaccguugcuacaauaaggccgucugaaaagaugugccgcaacgcucugccccuuaaagcuucugcuuuaaggggcaucguuuauuuc

SEQ ID NO: 439 - RNA, 110 nt, Pasteurella multocida
gcauauuguugcacugcgaaaugagagacguugcuacaauaaggcuucugaaaagaaugaccguaacgcucugccccuugugauucuuaauugcaaggggcaucguuuuu

SEQ ID NO: 440 - RNA, 115 nt, Mycoplasma mobile
uauuauguauuucgaaauacagauguacaguuaagaauacauaagaaugauacaucacuaaaaaaaggcuuuaugccguaacuacuacuuauuuucaaaauaaguaguuuuuuuu

SEQ ID NO: 441 - RNA, 26 nt, Artificial Sequence
  Synthetic sequence
uagcaaguuaaaauaaggcuaguccg

SEQ ID NO: 442 - RNA, 36 nt, Streptococcus pyogenes
uuguuggaaccauucaaaacagcauagcaaguuaaa

SEQ ID NO: 443 - RNA, 36 nt, Streptococcus mutans
guguuggaaucauucgaaacaacacagcaaguuaaa

SEQ ID NO: 444 - RNA, 36 nt, Streptococcus thermophilus
gguuugaaaccauucgaaacaacacagcgaguuaaa

SEQ ID NO: 445 - RNA, 36 nt, Streptococcus thermophilus
cuuacacaguuacuuaaaucuugcagaagcuacaaa

SEQ ID NO: 446 - RNA, 36 nt, Listeria innocua
auauuguuaguauucaaaauaacauagcaaguuaaa

SEQ ID NO: 447 - RNA, 34 nt, Listeria innocua
auuguuaguauucaaaauaacauagcaaguuaaa

SEQ ID NO: 448 - RNA, 36 nt, Treponema denticola
auuuaagauccaucuuaaauuacacaacgaguucaa

SEQ ID NO: 449 - RNA, 36 nt, Neisseria meningitidis
auugucgcacugcgaaaugagaaccguugcuacaau

SEQ ID NO: 450 - RNA, 38 nt, Neisseria meningitidis
auauugucgcacugcgaaaugagaaccguugcuacaau

SEQ ID NO: 451 - RNA, 36 nt, Streptococcus gordonii; identical to SEQ ID NO: 445

SEQ ID NO: 452 - RNA, 36 nt, Bifidobacterium bifidum
augaucaaggucauugaccugacaggcauaaauuga

SEQ ID NO: 453 - RNA, 36 nt, Lactobacillus salivarius
gguuuugaccucauugauuuaacauucugaguugaa

SEQ ID NO: 454 - RNA, 37 nt, Francisella tularensis
guuucaguuguuagauuauuugguauguacuuguguu

SEQ ID NO: 455 - RNA, 37 nt, Francisella tularensis
auuacagagcauuaauuauuugguacauuuauaauuu

SEQ ID NO: 456 - RNA, 37 nt, Legionella pneumophila
auuucaggguaucgaaauuuagaugauuucuaauuua

SEQ ID NO: 457 - RNA, 36 nt, Nitratifractor salsuginis
uguaacaggguaggguuuuuugaggggucuuaaaau

SEQ ID NO: 458 - RNA, 36 nt, Butyrivibrio fibrisolvens
aguuucuaaucacuuaauuuuuucggaccuacuaaa

SEQ ID NO: 459 - RNA, 36 nt, Streptobacillus moniliformis
gauucacauuauucaaguuuacuacagauucuguau

SEQ ID NO: 460 - RNA, 36 nt, Mycoplasma mobile
aguuaagaauacauaagaaugauacaucacuaaaaa

SEQ ID NO: 461 - RNA, 44 nt, Capnocytophaga ochracea
auugugaauugcuuucaaauugugcgacaaaaguagguauaaua

SEQ ID NO: 462 - RNA, 36 nt, Acidovorax ebreus
auugcagcaacggcucucaccccggauaaccacaau

SEQ ID NO: 463 - RNA, 36 nt, Wolinella succinogenes
auagccgcugccuacucagccauuuagcgcagcgac

SEQ ID NO: 464 - RNA, 37 nt, Wolinella succinogenes
uuuguuaaagcuggaugggauuauuauagaguguugc

SEQ ID NO: 465 - RNA, 37 nt, Wolinella succinogenes
uuucaaggcaucgaacggauuugcuauaaaguguugc

SEQ ID NO: 466 - RNA, 36 nt, Prevotella ruminicola
uuuugcacacguaagauuccuacaucuuaucacaau

SEQ ID NO: 467 - RNA, 48 nt, Fibrobacter succinogenes
auugugaauugcuuucagauuaugaaaauaauauaguuaaaauuuuug

SEQ ID NO: 468 - RNA, 36 nt, Campylobacter jejuni
auuuuauuucgauuuuaaucaacccuaaauuucaau

SEQ ID NO: 469 - RNA, 36 nt, Campylobacter jejuni
auuuuagucccuuuuuaaauuucuuaugagauuaua

SEQ ID NO: 470 - RNA, 25 nt, Campylobacter jejuni
aagaaauuuaaaaagggacuaaaau

SEQ ID NO: 471 - RNA, 36 nt, Pasteurella multocida
auuguagcaacgucucucauuucgcagugcaacaau

SEQ ID NO: 472 - RNA, 36 nt, Rhodopseudomonas palustris
gccguggcuuuccuaccgauuucccaccgcaugauu

SEQ ID NO: 473 - RNA, 36 nt, Olsenella uli
ucugaauuaccagucagaacgauacugcgagucaaa

SEQ ID NO: 474 - RNA, 36 nt, Rhodospirillum rubrum
guuccauggccccgucccacacgccaugauagagcg

SEQ ID NO: 475 - RNA, 36 nt, Rhodospirillum rubrum
aaacgggagaaccgucccacacggccaugguagagu

SEQ ID NO: 476 - RNA, 36 nt, Dinoroseobacter shibae
uuaacggcucgaccgcgaauucugaacguaaagaca

SEQ ID NO: 477 - RNA, 36 nt, Verminephrobacter eiseniae
uuagcguccagagcgcauaucccagugagauauccg

SEQ ID NO: 478 - RNA, 75 nt, Streptococcus pyogenes
aaacagcauagcaaguuaaaauaaggcuaguccguuaucaacuugaaaaaguggcaccgagucggugcuuuuuuu

SEQ ID NO: 479 - RNA, 77 nt, Listeria innocua
aaauaacauagcaaguuaaaauaaggcuuuguccguuaucaacuuuuaauuaaguagcgcuguuucggcgcuuuuuu

SEQ ID NO: 480 - RNA, 73 nt, Artificial Sequence
  Synthetic sequence
aacagcauagcaaguuaaaauaaggcuaguccguuaucaacuugaaaaaguggcaccgagucggugcuuuuuu

SEQ ID NO: 481 - RNA, 33 nt, Francisella novicida
uauaaauguaccaaauaauuaaugcucuguaau

SEQ ID NO: 482 - RNA, 74 nt, Campylobacter jejuni
aagaaauuuaaaaagggacuaaaauaaagaguuugcgggacucugcgggguuacaauccccuaaaaccgcuuuu

SEQ ID NO: 483 - RNA, 96 nt, Francisella novicida
aucuaaaauuauaaauguaccaaauaauuaaugcucuguaaucauuuaaaaguauuuugaacggaccucuguuugacacgucugaauaacuaaaaa

SEQ ID NO: 484 - RNA, 109 nt, Streptococcus thermophilus2
uguaagggacgccuuacacaguuacuuaaaucuugcagaagcuacaaagauaaggcuucaugccgaaaucaacacccugucauuuuauggcaggguguuuucguuauuu

SEQ ID NO: 485 - RNA, 110 nt, Mycoplasma mobile
uguauuucgaaauacagauguacaguuaagaauacauaagaaugauacaucacuaaaaaaaggcuuuaugccguaacuacuacuuauuuucaaaauaaguaguuuuuuuu

SEQ ID NO: 486 - RNA, 92 nt, Listeria innocua
auuguuaguauucaaaauaacauagcaaguuaaaauaaggcuuuguccguuaucaacuuuuaauuaaguagcgcuguuucggcgcuuuuuuu

SEQ ID NO: 487 - RNA, 89 nt, Streptococcus pyogenes; identical to SEQ ID NO: 390

SEQ ID NO: 488 - RNA, 107 nt, Streptococcus mutans
guuggaaucauucgaaacaacacagcaaguuaaaauaaggcagugauuuuuaauccaguccguacacaacuugaaaaagugcgcaccgauucggugcuuuuuuauuu

SEQ ID NO: 489 - RNA, 96 nt, Streptococcus thermophilus
uugugguuugaaaccauucgaaacaacacagcgaguuaaaauaaggcuuaguccguacucaacuugaaaagguggcaccgauucgguguuuuuuuu

SEQ ID NO: 490 - RNA, 102 nt, Neisseria meningitidis
acauauugucgcacugcgaaaugagaaccguugcuacaauaaggccgucugaaaagaugugccgcaacgcucugccccuuaaagcuucugcuuuaaggggca

SEQ ID NO: 491 - RNA, 110 nt, Pasteurella multocida; identical to SEQ ID NO: 439

SEQ ID NO: 492 - RNA, 37 nt, Francisella novicida
aacacaaguacauaccaaauaaucuaacaacugaaac

SEQ ID NO: 493 - RNA, 37 nt, Francisella novicida
aaauuauaaauguaccaaauaauuaaugcucuguaau

SEQ ID NO: 494 - RNA, 37 nt, Wolinella succinogenes; identical to SEQ ID NO: 465

SEQ ID NO: 495 - RNA, 37 nt, Wolinella succinogenes; identical to SEQ ID NO: 464

SEQ ID NO: 496 - RNA, 37 nt, gamma proteobacterium
auuucaguguauagaauguugggaugcauucugaaua

SEQ ID NO: 497 - RNA, 37 nt, gamma proteobacterium
auaacaagggaguauuugcuggaauaagcucugaaac

SEQ ID NO: 498 - RNA, 37 nt, Sutterella wadsworthensis
guuuccaagcaauagcucguggcguuaugauuucugu

SEQ ID NO: 499 - RNA, 37 nt, Sutterella wadsworthensis
ggugauuuccuauagcucauagcguuaugaucucuaa

SEQ ID NO: 500 - RNA, 37 nt, Legionella pneumophila; identical to SEQ ID NO: 456

SEQ ID NO: 501 - RNA, 36 nt, Listeria innocua; identical to SEQ ID NO: 446

SEQ ID NO: 502 - RNA, 36 nt, Streptococcus thermophilus; identical to SEQ ID NO: 444

SEQ ID NO: 503 - RNA, 36 nt, Streptococcus mutans; identical to SEQ ID NO: 443

SEQ ID NO: 504 - RNA, 36 nt, Streptococcus pyogenes; identical to SEQ ID NO: 442

SEQ ID NO: 505 - RNA, 36 nt, Fusobacterium nucleatum
auuuuuaauuuaaguaauaaaaaauggagcauauac

SEQ ID NO: 506 - RNA, 36 nt, Filifactor alocis
aguugacuaccauaugagauuacacuacacgguuca

SEQ ID NO: 507 - RNA, 36 nt, Treponema denticola; identical to SEQ ID NO: 448

SEQ ID NO: 508 - RNA, 36 nt, Solobacterium moorei
cuuauaccaguaagauaauuuacauaguaaguucaa

SEQ ID NO: 509 - RNA, 36 nt, Veillonella atypica
guuuuggagguuuacagaauuacacuacgaguucaa

SEQ ID NO: 510 - RNA, 36 nt, Finegoldia magna
guuuaauaccuauaugagauuacaucaugaguucaa

SEQ ID NO: 511 - RNA, 36 nt, Olsenella uli; identical to SEQ ID NO: 473

SEQ ID NO: 512 - RNA, 36 nt, Lactobacillus rhamnosus
caacuugaauugauugaucugacaucuacgaguuga

SEQ ID NO: 513 - RNA, 36 nt, Lactobacillus gasseri
ugauuagauuucauugaucuaacagccaucuaaaac

SEQ ID NO: 514 - RNA, 36 nt, Lactobacillus gasseri
acacuaaacuuuauugaucuaacaaccagauuuaaa

SEQ ID NO: 515 - RNA, 36 nt, Oenococcus kitaharae
ggguucuaccucauugaucugacacacagcauugaa

SEQ ID NO: 516 - RNA, 36 nt, Bifidobacterium bifidum; identical to SEQ ID NO: 452

SEQ ID NO: 517 - RNA, 36 nt, Staphylococcus pseudintermedius
guuuuacuucuuucuaaauaaacauaguuaaguuaa

SEQ ID NO: 518 - RNA, 36 nt, Eubacterium rectale
auuuuauagucacguaaauuuuucagaucuacuaaa

SEQ ID NO: 519 - RNA, 38 nt, Enterococcus faecalis
auuuuacugauaagaaauuauugagaaucuacaaaaau

SEQ ID NO: 520 - RNA, 36 nt, Streptococcus thermophilus; identical to SEQ ID NO: 445

SEQ ID NO: 521 - RNA, 36 nt, Staphylococcus lugdunensis
cuuguacuuauaccuaaaauuacagaaucuacugaa

SEQ ID NO: 522 - RNA, 36 nt, Eubacterium dolichum
aucauaaucuagcaaaaguuuauaugaucuaacaaa

SEQ ID NO: 523 - RNA, 36 nt, Mycoplasma mobile; identical to SEQ ID NO: 460

SEQ ID NO: 524 - RNA, 36 nt, Mycoplasma ovipneumoniae
auuuuacucuaguaagaaauugucgcacaaaaauaa

SEQ ID NO: 525 - RNA, 36 nt, Mycoplasma gallisepticum
auuauugcuuacacaauuauugucgugcuaaaauaa

SEQ ID NO: 526 - RNA, 36 nt, Mycoplasma canis
auuauuguuuacccaaauauuguacauccuaaauca

SEQ ID NO: 527 - RNA, 36 nt, Mycoplasma synoviae
uacuuacuuaacaaaauaauuguacgauuccaaaau

SEQ ID NO: 528 - RNA, 36 nt, Aminomonas paucivorans
gccuucccucccugccgaaggagcagauccucuccu

SEQ ID NO: 529 - RNA, 36 nt, Clostridium perfringens
uuauaguaacuaguuaaacucucgauaugcuauacc

SEQ ID NO: 530 - RNA, 36 nt, Clostridium cellulolyticum
auuauagcaacaauucaggcuccgauaugccauaau

SEQ ID NO: 531 - RNA, 36 nt, Acidovorax ebreus; identical to SEQ ID NO: 462

SEQ ID NO: 532 - RNA, 36 nt, Neisseria meningitidis; identical to SEQ ID NO: 449

SEQ ID NO: 533 - RNA, 36 nt, Pasteurella multocida
auuguugcacugcgaaaugagagacguugcuacaau

SEQ ID NO: 534 - RNA, 36 nt, phylotype Rs-D17
uuuguaacuuaucugagagaggaugguuauuauaau

SEQ ID NO: 535 - RNA, 36 nt, Wolinella succinogenes; identical to SEQ ID NO: 463

SEQ ID NO: 536 - RNA, 36 nt, Campylobacter jejuni
auaauacaaaaaucauuuuuuuaaacaaacauaaac

SEQ ID NO: 537 - RNA, 36 nt, Campylobacter jejuni
uauaaucucauaagaaauuuaaaaagggacuaaaau

SEQ ID NO: 538 - RNA, 36 nt, Helicobacter mustelae
guauuugucaauaaauauacuuuauaauggcaagau

SEQ ID NO: 539 - RNA, 36 nt, Roseburia intestinalis
uuguaauaaccuaauuaucacuugguaugauauaau

SEQ ID NO: 540 - RNA, 36 nt, Lactobacillus coryniformis
uuuuauucuauaguaaguuuucagcuaaaauagauc

SEQ ID NO: 541 - RNA, 36 nt, Rhodopseudomonas palustris; identical to SEQ ID NO: 472

SEQ ID NO: 542 - RNA, 36 nt, Cand. Puniceispirillum marinum
uaaccauaggcuccucaaucaccagaguguuauugc

SEQ ID NO: 543 - RNA, 36 nt, Verminephrobacter eiseniae; identical to SEQ ID NO: 477

SEQ ID NO: 544 - RNA, 36 nt, Ralstonia syzygii
guuaguagcaaagcgcaauucccgaucugcuggaaa

SEQ ID NO: 545 - RNA, 36 nt, Azospirillum B510
uuaacggcuggacccccgauccccaucgaauuucca

SEQ ID NO: 546 - RNA, 36 nt, Dinoroseobacter shibae; identical to SEQ ID NO: 476

SEQ ID NO: 547 - RNA, 36 nt, Rhodospirillum rubrum; identical to SEQ ID NO: 474

SEQ ID NO: 548 - RNA, 36 nt, Rhodospirillum rubrum; identical to SEQ ID NO: 475

SEQ ID NO: 549 - RNA, 36 nt, Spirochaeta Buddy
auuagagauaaucgcugguuuuuguuaagauauaac

SEQ ID NO: 550 - RNA, 36 nt, Prevotella ruminicola; identical to SEQ ID NO: 466

SEQ ID NO: 551 - RNA, 36 nt, Flavobacterium columnare
agauaaaauuauucuaaucuuuaaucuuaucacaau

SEQ ID NO: 552 - RNA, 36 nt, Parvibaculum lavamentivorans
cuugcgaaaagcgaccgccucucgauuugcuacaga

SEQ ID NO: 553 - RNA, 44 nt, Capnocytophaga ochracea; identical to SEQ ID NO: 461

SEQ ID NO: 554 - RNA, 48 nt, Fibrobacter succinogenes; identical to SEQ ID NO: 467

SEQ ID NO: 555 - RNA, 36 nt, Nitratifractor salsuginis; identical to SEQ ID NO: 457

SEQ ID NO: 556 - RNA, 36 nt, Akkermansia muciniphila
cuuauacgggaacuccacgauaaggcauuuuacaug

SEQ ID NO: 557 - RNA, 88 nt, Artificial Sequence
  Synthetic sequence
uuggaaccauucaaaacagcauagcaaguuaaaauaaggcuaguccguuaucaacuugaaaaaguggcaccgagucggugcuuuuuuu

SEQ ID NO: 558 - RNA, 77 nt, Artificial Sequence
  Synthetic sequence
caaaacagcauagcaaguuaaaauaaggcuaguccguuaucaacuugaaaaaguggcaccgagucggugcuuuuuuu

SEQ ID NO: 559 - RNA, 61 nt, Artificial Sequence
  Synthetic sequence
caaaacagcauagcaaguuaaaauaaggcuaguccguuaucaacuugaaaaaguuuuuuuu

SEQ ID NO: 560 - RNA, 44 nt, Artificial Sequence
  Synthetic sequence
caaaacagcauagcaaguuaaaauaaggcuaguccguuuuuuuu

SEQ ID NO: 561 - RNA, 72 nt, Artificial Sequence
  Synthetic sequence
caaaacagcauagcaaguuaaaauaaggcuaguccgguucacugccguauaggcagcuaagaaauuuuuuuu

SEQ ID NO: 562 - RNA, 14 nt, Artificial Sequence
  Synthetic sequence
uagcaaguuaaaau

SEQ ID NO: 563 - RNA, 102 nt, Artificial Sequence
  Synthetic sequence
  misc_feature (1)..(80): n is a, c, g, or u
nnnnnnnnnnnnnnnnnnnnnnnnnnnnnnnnnnnnnnnnnnnnnnnnnnnnnnnnnnnnnnnnnnnnnnnnnnnnnnnnguuuuagagcuaugcuguuuug

SEQ ID NO: 564 - RNA, 102 nt, Artificial Sequence
  Synthetic sequence
  misc_feature (1)..(80): n is a, c, g, or u
nnnnnnnnnnnnnnnnnnnnnnnnnnnnnnnnnnnnnnnnnnnnnnnnnnnnnnnnnnnnnnnnnnnnnnnnnnnnnnnnguuuuagagcuauguuauuuug

SEQ ID NO: 565 - RNA, 92 nt, exemplary
  misc_feature (1)..(80): n is a, c, g, or u
nnnnnnnnnnnnnnnnnnnnnnnnnnnnnnnnnnnnnnnnnnnnnnnnnnnnnnnnnnnnnnnnnnnnnnnnnnnnnnnnguuuuagagcua

SEQ ID NO: 566 - RNA, 152 nt, Artificial Sequence
  Synthetic sequence
  misc_feature (37)..(116): n is a, c, g, or u
guuuuagagcuaugcuguuuugaauggucccaaaacnnnnnnnnnnnnnnnnnnnnnnnnnnnnnnnnnnnnnnnnnnnnnnnnnnnnnnnnnnnnnnnnnnnnnnnnnnnnnnnnguuuuagagcuaugcuguuuugaauggucccaaaac

SEQ ID NO: 567 - RNA, 188 nt, Artificial Sequence
  Synthetic sequence
  misc_feature (37)..(116): n is a, c, g, or u
guuuuagagcuaugcuguuuugaauggucccaaaacnnnnnnnnnnnnnnnnnnnnnnnnnnnnnnnnnnnnnnnnnnnnnnnnnnnnnnnnnnnnnnnnnnnnnnnnnnnnnnnnguuuuagagcuaugcuguuuugaauggucccaaaacguuuuagagcuaugcuguuuugaauggucccaaaac

SEQ ID NO: 568 - RNA, 22 nt, exemplary
guuuuagagcuaugcuguuuug

SEQ ID NO: 569 - RNA, 36 nt, Streptococcus pyogenes
guuuuagagcuaugcuguuuugaauggucccaaaac

SEQ ID NO: 570 - RNA, 36 nt, Pasteurella multocida
guuguaguucccucucucauuucgcagugcuacaau

SEQ ID NO: 571 - RNA, 36 nt, Mycoplasma mobile
guuuugguguaguaucauucuuauguauucuuaaac

SEQ ID NO: 572 - RNA, 37 nt, Francisella novicida
guuucaguugcugaauuauuugguaaacuacuguuag

SEQ ID NO: 573 - RNA, 33 nt, Francisella novicida
guuucaguugcugaauuauuugguaaacuacug

SEQ ID NO: 574 - RNA, 36 nt, Streptococcus mutans
guuuuagagcuguguuguuucgaaugguuccaaaac

SEQ ID NO: 575 - RNA, 36 nt, Streptococcus thermophilus; identical to SEQ ID NO: 574

SEQ ID NO: 576 - RNA, 36 nt, Streptococcus thermophilus
guuuuuguacucucaagauuuaaguaacuguacaac

SEQ ID NO: 577 - RNA, 36 nt, Listeria innocua
guuuuagagcuauguuauuuugaaugcuaacaaaac

SEQ ID NO: 578 - RNA, 36 nt, Treponema denticola
guuugagaguuguguaauuuaagauggaucucaaac

SEQ ID NO: 579 - RNA, 36 nt, Neisseria meningitidis
guuguagcucccuuucucauuucgcagugcuacaau

SEQ ID NO: 580 - RNA, 36 nt, Streptococcus gordonii; identical to SEQ ID NO: 576

SEQ ID NO: 581 - RNA, 35 nt, Bifidobacterium bifidum
guuucaaugccugucagaucaaugacuuugaccac

SEQ ID NO: 582 - RNA, 36 nt, Lactobacillus salivarius
guuucagaaguauguuaaaucaauaagguuaagacc

SEQ ID NO: 583 - RNA, 37 nt, Francisella novicida
cuaacaguaguuuaccaaauaauucagcaacugaaac

SEQ ID NO: 584 - RNA, 37 nt, Francisella novicida; identical to SEQ ID NO: 583

SEQ ID NO: 585 - RNA, 37 nt, Legionella pneumophila
ccaauaaucccucaucuaaaaauccaaccacugaaac

SEQ ID NO: 586 - RNA, 36 nt, Nitratifractor salsuginis
guuuuaagaccccucaaaaccccacccuguuacaau

SEQ ID NO: 587 - RNA, 36 nt, Butyrivibrio fibrisolvens
guuuuaguacccgggaaaauuaagugauuggaaaac

SEQ ID NO: 588 - RNA, 36 nt, Streptobacillus moniliformis
gauacagauucuugguaaauuugaauaaugugaaug

SEQ ID NO: 589 - RNA, 36 nt, Mycoplasma mobile; identical to SEQ ID NO: 571

SEQ ID NO: 590 - RNA, 44 nt, Capnocytophaga ochracea
uguuaucaaucgcaaaacuacaaaauuugaaagcaauucacaac

SEQ ID NO: 591 - RNA, 36 nt, Acidovorax ebreus
aguguagcuauccggggugagagagggagcuacaac

SEQ ID NO: 592 - RNA, 36 nt, Wolinella succinogenes
auuauagcgaggaauggcugaguaggcggcuauaac

SEQ ID NO: 593 - RNA, 37 nt, Wolinella succinogenes
gcaacacuuuauagcaaauccgcuuagccugugaaac

SEQ ID NO: 594 - RNA, 37 nt, Wolinella succinogenes; identical to SEQ ID NO: 593

SEQ ID NO: 595 - RNA, 36 nt, Prevotella ruminicola
guugugguuugauguaggaaaggaaugauauacaac

SEQ ID NO: 596 - RNA, 48 nt, Fibrobacter succinogenes
guuguuauugcacuaguaaaacuagaaaaucugaaagcaauucacaac

SEQ ID NO: 597 - RNA, 36 nt, Campylobacter jejuni
auuuuaccauaaagaaauuuaaaaagggacuaaaac

SEQ ID NO: 598 - RNA, 36 nt, Campylobacter jejuni
guuuuagucccuuuuuaaauuucuuuaugguaaaau

SEQ ID NO: 599 - RNA, 36 nt, Pasteurella multocida
auuguagcacugcgaaaugagagagggaacuacaac

SEQ ID NO: 600 - RNA, 36 nt, Rhodopseudomonas palustris
agccuaccacggggaaaucgguagggaagccacggc

SEQ ID NO: 601 - RNA, 36 nt, Olsenella uli
guuuuggggcagugucguuuugacugguaaucaaac

SEQ ID NO: 602 - RNA, 36 nt, Rhodospirillum rubrum
acucuaccauggcggugugggacggggccauggaac

SEQ ID NO: 603 - RNA, 36 nt, Rhodospirillum rubrum; identical to SEQ ID NO: 602

SEQ ID NO: 604 - RNA, 36 nt, Dinoroseobacter shibae
aguuuagcuguucagaauucgggguccagccgcaac

SEQ ID NO: 605 - RNA, 36 nt, Verminephrobacter eiseniae
auuguagcucacugggauaugcgcacuggccggaac

SEQ ID NO: 606 - RNA, 37 nt, Francisella novicida; identical to SEQ ID NO: 572

SEQ ID NO: 607 - RNA, 37 nt, Francisella novicida; identical to SEQ ID NO: 572

SEQ ID NO: 608 - RNA, 37 nt, Wolinella succinogenes; identical to SEQ ID NO: 593

SEQ ID NO: 609 - RNA, 37 nt, Wolinella succinogenes; identical to SEQ ID NO: 593

SEQ ID NO: 610 - RNA, 37 nt, gamma proteobacterium
guuucagagcuuaucccaacaaaccaacagcugaaac

SEQ ID NO: 611 - RNA, 37 nt, gamma proteobacterium; identical to SEQ ID NO: 610

SEQ ID NO: 612 - RNA, 37 nt, Sutterella wadsworthensis
gcgaagaucauaacgcuacgagcuauagcacugaaac

SEQ ID NO: 613 - RNA, 37 nt, Sutterella wadsworthensis; identical to SEQ ID NO: 612

SEQ ID NO: 614 - RNA, 37 nt, Legionella pneumophila; identical to SEQ ID NO: 585

SEQ ID NO: 615 - RNA, 36 nt, Listeria innocua; identical to SEQ ID NO: 577

SEQ ID NO: 616 - RNA, 36 nt, Streptococcus thermophilus; identical to SEQ ID NO: 574

SEQ ID NO: 617 - RNA, 36 nt, Streptococcus mutans; identical to SEQ ID NO: 574

SEQ ID NO: 618 - RNA, 36 nt, Streptococcus pyogenes; identical to SEQ ID NO: 569

SEQ ID NO: 619 - RNA, 36 nt, Fusobacterium nucleatum
guuugagaguaauguuauuuuaaauagauucaaaac

SEQ ID NO: 620 - RNA, 36 nt, Filifactor alocis
guuugagaguaguguaauuucauaugguagucaaac

SEQ ID NO: 621 - RNA, 36 nt, Treponema denticola; identical to SEQ ID NO: 578

SEQ ID NO: 622 - RNA, 36 nt, Solobacterium moorei
guuugagaacuauguaaauuaugcugguagcaaaac

SEQ ID NO: 623 - RNA, 36 nt, Veillonella atypica
guuugcgaguaguguaauucuguaaaucucuaaaac

SEQ ID NO: 624 - RNA, 36 nt, Finegoldia magna
guuugagaaugauguaauuucauauagguauuaaac

SEQ ID NO: 625 - RNA, 36 nt, Olsenella uli; identical to SEQ ID NO: 601

SEQ ID NO: 626 - RNA, 36 nt, Lactobacillus rhamnosus
gucucagguagaugucagaucaaucaguucaagagc

SEQ ID NO: 627 - RNA, 36 nt, Lactobacillus gasseri
guuuuagaugguuguuagaucaauaagguuuagauc

SEQ ID NO: 628 - RNA, 36 nt, Lactobacillus gasseri; identical to SEQ ID NO: 627

SEQ ID NO: 629 - RNA, 36 nt, Oenococcus kitaharae
gcuucagaugugugucagaucaaugagguagaaccc

SEQ ID NO: 630 - RNA, 36 nt, Bifidobacterium bifidum
guuucagaugccugucagaucaaugacuuugaccac

SEQ ID NO: 631 - RNA, 36 nt, Staphylococcus pseudintermedius
guuuuagcacuauguuuauuuagaaagagguaaaac

SEQ ID NO: 632 - RNA, 36 nt, Eubacterium rectale
auuuuaguaacugaauaauuuacgugacuguaaaac

SEQ ID NO: 633 - RNA, 36 nt, Enterococcus faecalis
guuuuuguauucucaauaauuucuuaucaguaaaac

SEQ ID NO: 634 - RNA, 36 nt, Streptococcus thermophilus; identical to SEQ ID NO: 576

SEQ ID NO: 635 - RNA, 36 nt, Staphylococcus lugdunensis
guuuuaguacucuguaauuuuagguauaagugauac

SEQ ID NO: 636 - RNA, 36 nt, Eubacterium dolichum
guuuuguuaccauauggauuuuugcuagauuaagac

SEQ ID NO: 637 - RNA, 36 nt, Mycoplasma mobile; identical to SEQ ID NO: 571

SEQ ID NO: 638 - RNA, 36 nt, Mycoplasma ovipneumoniae
guuuuugugcuguacaauuucuuacuagaguaaaac

SEQ ID NO: 639 - RNA, 36 nt, Mycoplasma gallisepticum
guuuuagcacuguacaauacuuguguaagcaauaac

SEQ ID NO: 640 - RNA, 36 nt, Mycoplasma canis
guuuuaguguuguacaauauuuggguaaacaauaac

SEQ ID NO: 641 - RNA, 36 nt, Mycoplasma synoviae
guuuugggguuguacaauuauuuuguuaaguaaaac

SEQ ID NO: 642 - RNA, 36 nt, Aminomonas paucivorans
agcauagcauuucggagugcggcagggagcuaugac

SEQ ID NO: 643 - RNA, 36 nt, Clostridium perfringens
auuauagcauaucgagaauuuacuaggaacuauaac

SEQ ID NO: 644 - RNA, 36 nt, Clostridium cellulolyticum
auuauagcauaucggagccugaauuggagcuauaac

SEQ ID NO: 645 - RNA, 36 nt, Acidovorax ebreus; identical to SEQ ID NO: 591

SEQ ID NO: 646 - RNA, 36 nt, Neisseria meningitidis; identical to SEQ ID NO: 579

SEQ ID NO: 647 - RNA, 36 nt, Pasteurella multocida; identical to SEQ ID NO: 570

SEQ ID NO: 648 - RNA, 36 nt, phylotype Rs-D17
guuauaguuuccuuccucucucagaugugcuauaau

SEQ ID NO: 649 - RNA, 36 nt, Wolinella succinogenes; identical to SEQ ID NO: 592

SEQ ID NO: 650 - RNA, 36 nt, Campylobacter jejuni; identical to SEQ ID NO: 598

SEQ ID NO: 651 - RNA, 36 nt, Campylobacter jejuni; identical to SEQ ID NO: 598

SEQ ID NO: 652 - RNA, 36 nt, Helicobacter mustelae
auuuuagcauaaacauauuuaugaaguggcuaaaac

SEQ ID NO: 653 - RNA, 36 nt, Roseburia intestinalis
auuauaccauaccaagugauaacagggaauuacaac

SEQ ID NO: 654 - RNA, 36 nt, Lactobacillus coryniformis
gaucuauuuuagcugaaaacugaaggaaucaauagc

SEQ ID NO: 655 - RNA, 36 nt, Rhodopseudomonas palustris; identical to SEQ ID NO: 600

SEQ ID NO: 656 - RNA, 36 nt, Cand. Puniceispirillum marinum
aguauagcacucuggugauugagagccuagagcaac

SEQ ID NO: 657 - RNA, 36 nt, Verminephrobacter eiseniae; identical to SEQ ID NO: 605

SEQ ID NO: 658 - RNA, 36 nt, Ralstonia syzygii
agguuagcagaucgggaauugcgcucuggcuacaac

SEQ ID NO: 659 - RNA, 36 nt, Azospirillum B510
aguguagccgauggggaucggggguccagccgcaac

SEQ ID NO: 660 - RNA, 36 nt, Dinoroseobacter shibae; identical to SEQ ID NO: 604

SEQ ID NO: 661 - RNA, 36 nt, Rhodospirillum rubrum; identical to SEQ ID NO: 602

SEQ ID NO: 662 - RNA, 36 nt, Rhodospirillum rubrum; identical to SEQ ID NO: 602

SEQ ID NO: 663 - RNA, 36 nt, Spirochaeta Buddy
ggucaaucuuaacaaaaaucagcggucauccccaac

SEQ ID NO: 664 - RNA, 36 nt, Prevotella ruminicola; identical to SEQ ID NO: 595

SEQ ID NO: 665 - RNA, 36 nt, Flavobacterium columnare
guugugguuugauuaaagauuagaaaacacgauauu

SEQ ID NO: 666 - RNA, 36 nt, Parvibaculum lavamentivorans
agaguagcaaaucgagagacggccgcaauccgcagc

SEQ ID NO: 667 - RNA, 44 nt, Capnocytophaga ochracea; identical to SEQ ID NO: 590

SEQ ID NO: 668 - RNA, 48 nt, Fibrobacter succinogenes; identical to SEQ ID NO: 596

SEQ ID NO: 669 - RNA, 36 nt, Nitratifractor salsuginis; identical to SEQ ID NO: 586

SEQ ID NO: 670 - RNA, 36 nt, Akkermansia muciniphila
guuguacugugccuuauuuuggauucaaggcaaaac

SEQ ID NO: 671 - RNA, 44 nt, Artificial Sequence
  Synthetic sequence
guuuuagagcuagaaauagcaaguuaaaauaaggcuaguccguu

SEQ ID NO: 672 - RNA, 60 nt, Artificial Sequence
  Synthetic sequence
  misc_feature (13)..(17): n is a, c, g, or u
guuuuagagcuannnnnuagcaaguuaaaauaaguuaaaauaaggcuaguccguuaucaa

SEQ ID NO: 673 - RNA, 68 nt, Artificial Sequence
  Synthetic sequence
guuuuagagcuaugcugaaaagcauagcaaguuaaaaauaaguuaaaauaaggcuaguccguuaucaa

SEQ ID NO: 674 - RNA, 69 nt, Artificial Sequence
  Synthetic sequence
guuuuagagcuaugcuguuuuggaaacaaaacagcauagcaaguuaaaauaaggcuaguccguuaucaa

SEQ ID NO: 675 - RNA, 70 nt, Artificial Sequence
  Synthetic sequence
guuuuagagcuaguuuuagagcuagaaauagcaaguuaaaauuagcaaguuaaaauaaggcuaguccguu

SEQ ID NO: 676 - RNA, 70 nt, Artificial Sequence
  Synthetic sequence
guuuuagagcuauagcaaguuaaaaugaaaguuuuagagcuauagcaaguuaaaauaaggcuaguccguu

SEQ ID NO: 677 - RNA, 74 nt, Artificial Sequence
  Synthetic sequence
guuuuagagcuagaaauagcaaguuaaaauguuuuagagcuagaaauagcaaguuaaaauaaggcuaguccguu

SEQ ID NO: 678 - RNA, 119 nt, Artificial Sequence
  Synthetic sequence
guuuuagagcuaugcuguuuuggaaacaaaacagcauagcaaguuaaaauguuuuagagcuaugcuguuuuggaaacaaaacagcauagcaaguuaaaauaaggcuaguccguuaucaa

SEQ ID NO: 679 - RNA, 12 nt, Artificial Sequence
  Synthetic sequence
guuuuagagcua

SEQ ID NO: 680 - RNA, 218 nt, Artificial Sequence
  Synthetic sequence
  misc_feature (1)..(80): n is a, c, g, or u
  misc_feature (93)..(192): n is a, c, g, or u
nnnnnnnnnnnnnnnnnnnnnnnnnnnnnnnnnnnnnnnnnnnnnnnnnnnnnnnnnnnnnnnnnnnnnnnnnnnnnnnnguuuuagagcuannnnnnnnnnnnnnnnnnnnnnnnnnnnnnnnnnnnnnnnnnnnnnnnnnnnnnnnnnnnnnnnnnnnnnnnnnnnnnnnnnnnnnnnnnnnnnnnnnnnuagcaaguuaaaauaaggcuaguccg

SEQ ID NO: 681 - RNA, 219 nt, Artificial Sequence
  Synthetic sequence
  misc_feature (1)..(80): n is a, c, g, or u
  misc_feature (93)..(192): n is a, c, g, or u
nnnnnnnnnnnnnnnnnnnnnnnnnnnnnnnnnnnnnnnnnnnnnnnnnnnnnnnnnnnnnnnnnnnnnnnnnnnnnnnnguuuuagagcuannnnnnnnnnnnnnnnnnnnnnnnnnnnnnnnnnnnnnnnnnnnnnnnnnnnnnnnnnnnnnnnnnnnnnnnnnnnnnnnnnnnnnnnnnnnnnnnnnnnuagcaaguuaaaauaaggcuuuguccg

SEQ ID NO: 682 - RNA, 163 nt, Artificial Sequence
  Synthetic sequence
  misc_feature (1)..(80): n is a, c, g, or u
nnnnnnnnnnnnnnnnnnnnnnnnnnnnnnnnnnnnnnnnnnnnnnnnnnnnnnnnnnnnnnnnnnnnnnnnnnnnnnnnguuuuagagcuagaaauagcaaguuaaaauaaggcuaguccguuaucaacuugaaaaaguggcaccgagucggugcuuuuuuu

SEQ ID NO: 683 - RNA, 39 nt, Artificial Sequence
  Synthetic sequence
aucaacuugaaaaaguggcaccgagucggugcuuuuuuu

SEQ ID NO: 684 - RNA, 33 nt, Artificial Sequence
  Synthetic sequence
aaaaucaaaggaucuucuugagauccuuuuuuu

SEQ ID NO: 685 - RNA, 34 nt, Artificial Sequence
  Synthetic sequence
cgccgaaaaccccgcuucggcgggguuuugccgc

SEQ ID NO: 686 - RNA, 34 nt, Artificial Sequence
  Synthetic sequence
cgcaaaaaaccccgcuucggcgggguuuuuucgc

SEQ ID NO: 687 - RNA, 39 nt, Artificial Sequence
  Synthetic sequence
aaaaaaaaaccccgccccugacagggcgggguuuuuuuu

SEQ ID NO: 688 - RNA, 40 nt, Artificial Sequence
  Synthetic sequence
cgcaaaaaaccccgccccugacagggcgggguuuuuucgc

SEQ ID NO: 689 - RNA, 41 nt, Artificial Sequence
  Synthetic sequence
ucacacuggcucaccuucgggugggccuuucugcguuuaua

SEQ ID NO: 690 - RNA, 46 nt, Artificial Sequence
  Synthetic sequence
agagaauauaaaaagccagauuauuaauccggcuuuuuuauuauuu

SEQ ID NO: 691 - RNA, 80 nt, Artificial Sequence
  Synthetic sequence
ccaggcaucaaauaaaacgaaaggcucagucgaaagacugggccuuucguuuuaucuguuguuugucggugaacgcucuc

SEQ ID NO: 692 - RNA, 123 nt, Artificial Sequence
  Synthetic sequence
aucaaaauuuacggcuuugaaaaaguaauuucgugaccuucgguauaagguuacuacuagauucaggugcucaucagaugcaccacauucucuauaaaaaaaaaugguaucuuucuuauuuga

SEQ ID NO: 693 - RNA, 129 nt, Artificial Sequence
  Synthetic sequence
ccaggcaucaaauaaaacgaaaggcucagucgaaagacugggccuuucguuuuaucuguuguuugucggugaacgcucucuacuagagucacacuggcucaccuucgggugggccuuucugcguuuaua

SEQ ID NO: 694 - RNA, 129 nt, Artificial Sequence
  Synthetic sequence
gcaugugcucuguauguauauaaaacucuuguuuucuucuuuucucuaaauauucuuuccuuauacauuaggaccuuugcagcauaaauuacuauacuucuauuacuagagcccgccgccaccauggag

SEQ ID NO: 695 - RNA, 139 nt, Artificial Sequence
  Synthetic sequence
auuccgauaacuuguuuauugcagcuuauaaugguuacaaauaaagcaauagcaucacaaauuucacaaauaaagcauuuuuuucacugcauucuaguugugguuuguccaaacucaucaauguaucuuaucaugucug

SEQ ID NO: 696 - RNA, 225 nt, Artificial Sequence
  Synthetic sequence
uaauaagcgaauuucuuaugauuuaugauuuuuauuauuaaauaaguuauaaaaaaaauaaguguauacaaauuuuaaagugacucuuagguuuuaaaacgaaaauucuuauucuugaguaacucuuuccuguaggucagguugcuuucucagguauagcaugaggucgcucuuauugaccacaccucuaccggcaugccgagcaaaugccugcaaaucgcuccc

SEQ ID NO: 697 - RNA, 53 nt, Artificial Sequence
  Synthetic sequence
aacuuucaguuuagcggucuguuuuagagcuagaaauagcaaguuaaaauaag

SEQ ID NO: 698 - DNA, 31 bp, Artificial Sequence
  Synthetic sequence
aaggtacccagaccgctaaactgaaagttac

SEQ ID NO: 699 - DNA, 31 bp, Artificial Sequence
  Synthetic sequence
gtaactttcagtttagcggtctgggtacctt

SEQ ID NO: 700 - DNA, 40 bp, Artificial Sequence
  Synthetic sequence
agtttttaaaagagcttggcggttgttttagtcccttttt

SEQ ID NO: 701 - DNA, 42 bp, Artificial Sequence
  Synthetic sequence
caaagtttcattagttgaatttaactgttttagtcccttttt

SEQ ID NO: 702 - DNA, 42 bp, Artificial Sequence
  Synthetic sequence
aagaatgaggatgatgatattttacagttttagtcccttttt

SEQ ID NO: 703 - DNA, 42 bp, Artificial Sequence
  Synthetic sequence
gtgtgctaaaaaaaatggacttaaatgttttagtcccttttt

SEQ ID NO: 704 - DNA, 74 bp, Artificial Sequence
  Synthetic sequence
aagaaatttaaaaagggactaaaataaagagtttgcgggactctgcggggttacaatcccctaaaaccgctttt

SEQ ID NO: 705 - DNA, 54 bp, Artificial Sequence
  Synthetic sequence
ataactcgaccaatatttgacaaagtttcagttgctgaattatttggtaaacct

SEQ ID NO: 706 - DNA, 58 bp, Artificial Sequence
  Synthetic sequence
ggcaggttttgtatggtcatataggagtgtttcagttgctgaattatttggtaaacct

SEQ ID NO: 707 - DNA, 69 bp, Artificial Sequence
  Synthetic sequence
agctatagggttacctatcttttgagtgttggcaaataagtttcagttgctgaattatttggtaaacct

SEQ ID NO: 708 - DNA, 54 bp, Artificial Sequence
  Synthetic sequence
atgcttttaaactactgatatatacgtttcagttgctgaattatttggtaaact

SEQ ID NO: 709 - DNA, 80 bp, Artificial Sequence
  Synthetic sequence
gtaccaaataattaatgctctgtaatcatttaaaagtattttgaacggacctctgtttgacacgtctgaataactaaaaa

SEQ ID NO: 710 - DNA, 52 bp, Artificial Sequence
  Synthetic sequence
tatccattcccagccggaaattaagttgtagctccctttctcatttcgcagt

SEQ ID NO: 711 - DNA, 53 bp, Artificial Sequence
  Synthetic sequence
gcctttttacaagctcgctttctttgttgtagctccctttctcatttcgcagt

SEQ ID NO: 712 - DNA, 53 bp, Artificial Sequence
  Synthetic sequence
taaaggtttctgttgcgacccgaatgttgtagctccctttctcatttcgcagt

SEQ ID NO: 713 - DNA, 55 bp, Artificial Sequence
  Synthetic sequence
taactttgaccgtgtgcaatccagttagttgtagctccctttctcatttcgcagt

SEQ ID NO: 714 - DNA, 52 bp, Artificial Sequence
  Synthetic sequence
aacccactaaattttgcaaatgcggttgtagctccctttctcatttcgcagt

SEQ ID NO: 715 - DNA, 53 bp, Artificial Sequence
  Synthetic sequence
tttttttgtactgttgtttgaacgagttgtagctccctttctcatttcgcagt

SEQ ID NO: 716 - DNA, 55 bp, Artificial Sequence
  Synthetic sequence
ttcgtttcagatagcaaacgcagtagtgttgtagctccctttctcatttcgcagt

SEQ ID NO: 717 - DNA, 84 bp, Artificial Sequence
  Synthetic sequence
atatgacggtgggcaactggtacaggttgtagctccctttctcatttcgcagtgctacaatgccggatatgacggtgggcaact

SEQ ID NO: 718 - DNA, 52 bp, Artificial Sequence
  Synthetic sequence
cttttgtattgattcaaggtgcttgttgtagctccctttctcatttcgcagt

SEQ ID NO: 719 - DNA, 55 bp, Artificial Sequence
  Synthetic sequence
attcgtcgatgatggaaactcgagcatgttgtagctccctttctcatttcgcagt

SEQ ID NO: 720 - DNA, 55 bp, Artificial Sequence
  Synthetic sequence
tagccagtgctaaaaccgcacccgcttgttgtagctccctttctcatttcgcagt

SEQ ID NO: 721 - DNA, 54 bp, Artificial Sequence
  Synthetic sequence
atagaaatacatacgccgagtaattagttgtagctccctttctcatttcgcagt

SEQ ID NO: 722 - DNA, 54 bp, Artificial Sequence
  Synthetic sequence
tttttgtaattgttctgccttttttagttgtagctccctttctcatttcgcagt

SEQ ID NO: 723 - DNA, 53 bp, Artificial Sequence
  Synthetic sequence
acggcggaaaccattgccacaaaacgttgtagctccctttctcatttcgcagt

SEQ ID NO: 724 - DNA, 54 bp, Artificial Sequence
  Synthetic sequence
aataataacccaatacacgatgttaagttgtagctccctttctcatttcgcagt

SEQ ID NO: 725 - DNA, 171 bp, Artificial Sequence
  Synthetic sequence
ttgtcttatttatatacaaatagattattgacttatcatctcacaacggctagaatcccaaacatattgtcgcactgcgaaatgagaaccgttgctacaataaggccgtctgaaaagatgtgccgcaacgctctgccccttaaagcttctgctttaaggggcatcgtttat

SEQ ID NO: 726 - DNA, 35 bp, Artificial Sequence
  Synthetic sequence
ggtaactttgcctaggatagttttagagctatgtt

SEQ ID NO: 727 - DNA, 22 bp, Artificial Sequence
  Synthetic sequence
cattatgttttagagctatgtt

SEQ ID NO: 728 - DNA, 24 bp, Artificial Sequence
  Synthetic sequence
gagttttagagctatgttattttg

SEQ ID NO: 729 - DNA, 27 bp, Artificial Sequence
  Synthetic sequence
ttatagttttagagctatgttattttg

SEQ ID NO: 730 - DNA, 26 bp, Artificial Sequence
  Synthetic sequence
taaatgttttagagctatgttatttt

SEQ ID NO: 731 - DNA, 23 bp, Artificial Sequence
  Synthetic sequence
tacaagttttagagctatgttat

SEQ ID NO: 732 - DNA, 30 bp, Artificial Sequence
  Synthetic sequence
ttcatgttgttttagagctatgttattttg

SEQ ID NO: 733 - DNA, 28 bp, Artificial Sequence
  Synthetic sequence
gttttagagctatgctatttcgaatact

SEQ ID NO: 734 - DNA, 92 bp, Artificial Sequence
  Synthetic sequence
attgttagtattcaaaataacatagcaagttaaaataaggctttgtccgttatcaacttttaattaagtagcgctgtttcggcgcttttttt

SEQ ID NO: 735 - DNA, 43 bp, Artificial Sequence
  Synthetic sequence
gccattaattaatatggtgagttttagagctgtgttgtttcga

SEQ ID NO: 736 - DNA, 43 bp, Artificial Sequence
  Synthetic sequence
gctagcgcagttagtgctctgttttagagctgtgttgtttcga

SEQ ID NO: 737 - DNA, 43 bp, Artificial Sequence
  Synthetic sequence
tgttgtgtcatcatagttaggttttagagctgtgttgtttcga

SEQ ID NO: 738 - DNA, 43 bp, Artificial Sequence
  Synthetic sequence
caattagacaatagacaaacgttttagagctgtgttgtttcga

SEQ ID NO: 739 - DNA, 44 bp, Artificial Sequence
  Synthetic sequence
ttcggacatgacttgccacagttttagagctgtgttgttatcga

SEQ ID NO: 740 - DNA, 107 bp, Artificial Sequence
  Synthetic sequence
gttggaatcattcgaaacaacacagcaagttaaaataaggcagtgatttttaatccagtccgtacacaacttgaaaaagtgcgcaccgattcggtgcttttttattt

SEQ ID NO: 741 - RNA, 20 nt, Artificial Sequence
  Synthetic sequence
ugguccgcugccguucgcuu

SEQ ID NO: 742 - RNA, 20 nt, Artificial Sequence
  Synthetic sequence
gcagaaaaaaaccauggguu

SEQ ID NO: 743 - RNA, 20 nt, Artificial Sequence
  Synthetic sequence
aaaaaaccgguucagcugcc

SEQ ID NO: 744 - RNA, 20 nt, Artificial Sequence
  Synthetic sequence
aacuuucaguuuagcggucu

SEQ ID NO: 745 - RNA, 20 nt, Artificial Sequence
  Synthetic sequence
aggacaguuucagguagucc

SEQ ID NO: 746 - RNA, 20 nt, Artificial Sequence
  Synthetic sequence
aaccgguuuuuuagccaugu

SEQ ID NO: 747 - RNA, 20 nt, Artificial Sequence
  Synthetic sequence
uugacagcuagcucaguccu

SEQ ID NO: 748 - RNA, 20 nt, Artificial Sequence
  Synthetic sequence
cccggaagagagucaauuca

SEQ ID NO: 749 - RNA, 20 nt, Artificial Sequence
  Synthetic sequence
cccugaauugacucucuucc

SEQ ID NO: 750 - RNA, 20 nt, Artificial Sequence
  Synthetic sequence
gaauucauuaaagaggagaa

SEQ ID NO: 751 - RNA, 20 nt, Artificial Sequence
  Synthetic sequence
gaauggugcaaaaccuuucg

SEQ ID NO: 752 - DNA, 141 bp, Artificial Sequence
  Synthetic sequence
cgacaccatcgaatggtgcaaaacctttcgcggtatggcatgatagcgcccggaagagagtcaattcagggtggtgaatttgacagctagctcagtcctaggtataatagatctgaattcattaaagaggagaaaggtacc

SEQ ID NO: 753 - RNA, 20 nt, Artificial Sequence
  Synthetic sequence
aacuuucaguuuagcggucu

SEQ ID NO: 754 - RNA, 20 nt, Artificial Sequence
  Synthetic sequence
uggaaccguacuggaacugc

SEQ ID NO: 755 - RNA, 20 nt, Artificial Sequence
  Synthetic sequence
gguaguccgggaugucagcc

SEQ ID NO: 756 - RNA, 20 nt, Artificial Sequence
  Synthetic sequence
aggacaguuucagguagucc

SEQ ID NO: 757 - RNA, 20 nt, Artificial Sequence
  Synthetic sequence
gucuugcagggaggaguccu

SEQ ID NO: 758 - RNA, 20 nt, Artificial Sequence
  Synthetic sequence
gcauaaccggaccgucggac

SEQ ID NO: 759 - RNA, 20 nt, Artificial Sequence
  Synthetic sequence
cuuucagagcaccgucuucc

SEQ ID NO: 760 - RNA, 20 nt, Artificial Sequence
  Synthetic sequence
gaugguguagucuucguugu

SEQ ID NO: 761 - RNA, 20 nt, Artificial Sequence
  Synthetic sequence
caucuaauucaacaagaauu

SEQ ID NO: 762 - RNA, 20 nt, Artificial Sequence
  Synthetic sequence
caucuaauucaacaagaauu

SEQ ID NO: 763 - RNA, 20 nt, Artificial Sequence
  Synthetic sequence
aguagugcaaauaaauuuaa

SEQ ID NO: 764 - RNA, 20 nt, Artificial Sequence
  Synthetic sequence
acaaguguuggccacggaac

SEQ ID NO: 765 - RNA, 20 nt, Artificial Sequence
  Synthetic sequence
uuucaugugauccggauaac

SEQ ID NO: 766 - RNA, 20 nt, Artificial Sequence
  Synthetic sequence
cguuccuguacauaaccuuc

SEQ ID NO: 767 - RNA, 20 nt, Artificial Sequence
  Synthetic sequence
uaacucgauacgauuaacaa

SEQ ID NO: 768 - RNA, 20 nt, Artificial Sequence
  Synthetic sequence
auaauggucugcuaguugaa

SEQ ID NO: 769 - RNA, 20 nt, Artificial Sequence
  Synthetic sequence
auguggucacgcuuuucguu

SEQ ID NO: 770 - RNA, 20 nt, Artificial Sequence
  Synthetic sequence
aacuuucaguuuagcggucu

SEQ ID NO: 771 - RNA, 20 nt, Artificial Sequence
  Synthetic sequence
uggaaccguacuggaacugc

SEQ ID NO: 772 - RNA, 20 nt, Artificial Sequence
  Synthetic sequence
gaugguguagucuucguugu

SEQ ID NO: 773 - RNA, 20 nt, Artificial Sequence
  Synthetic sequence
uuccggguacauacguucgg

SEQ ID NO: 774 - RNA, 20 nt, Artificial Sequence
  Synthetic sequence
gguaguccgggaugucagcc

SEQ ID NO: 775 - RNA, 20 nt, Artificial Sequence
  Synthetic sequence
aggacaguuucagguagucc

SEQ ID NO: 776 - RNA, 20 nt, Artificial Sequence
  Synthetic sequence
uugacagcuagcucaguccu

SEQ ID NO: 777 - RNA, 20 nt, Artificial Sequence
  Synthetic sequence
aaccgguuuuuuagccaugu

SEQ ID NO: 778 - RNA, 20 nt, Artificial Sequence
  Synthetic sequence
aaaaaaccgguucagcugcc

SEQ ID NO: 779 - RNA, 20 nt, Artificial Sequence
  Synthetic sequence
uugggaagggcgaucggugc

SEQ ID NO: 780 - RNA, 20 nt, Artificial Sequence
  Synthetic sequence
gcuggccugguucaccacgc

SEQ ID NO: 781 - RNA, 20 nt, Artificial Sequence
  Synthetic sequence
guagccaaaucgggaaaaac

SEQ ID NO: 782 - RNA, 20 nt, Artificial Sequence
  Synthetic sequence
cgguaagccuucgcacauau

SEQ ID NO: 783 - RNA, 20 nt, Artificial Sequence
  Synthetic sequence
acaagaaccauucgagaguc

SEQ ID NO: 784 - RNA, 20 nt, Artificial Sequence
  Synthetic sequence
gucaagcagcaguauaugcu

SEQ ID NO: 785 - RNA, 20 nt, Artificial Sequence
  Synthetic sequence
ugugaguuagcucacucauu

SEQ ID NO: 786 - RNA, 20 nt, Artificial Sequence
  Synthetic sequence
auguuguguggaauugugag

SEQ ID NO: 787 - RNA, 20 nt, Artificial Sequence
  Synthetic sequence
cuuccggcucguauguugug

SEQ ID NO: 788 - RNA, 20 nt, Artificial Sequence
  Synthetic sequence
gggcgaggagcuguucaccg

SEQ ID NO: 789 - RNA, 20 nt, Artificial Sequence
  Synthetic sequence
ggccacaaguucagcguguc

SEQ ID NO: 790 - RNA, 20 nt, Artificial Sequence
  Synthetic sequence
gcccuugcucaccaugguug

SEQ ID NO: 791 - RNA, 20 nt, Artificial Sequence
  Synthetic sequence
gaccaggaugggcaccaccc

SEQ ID NO: 792 - RNA, 20 nt, Artificial Sequence
  Synthetic sequence
gguggugcagaugaacuuca

SEQ ID NO: 793 - RNA, 20 nt, Artificial Sequence
  Synthetic sequence
guggucacgagggugggcca

SEQ ID NO: 794 - RNA, 20 nt, Artificial Sequence
  Synthetic sequence
gcacggggccgucgccgaug

SEQ ID NO: 795 - protein, 240 aa, Acetobacter aceti
MANIAENLVFGIDLGIGSCGWAVLNQKAKDENIVALGSWCFDVPETDKERIPTNQIRRANRLLRRVIRRRRNRMAEIRRLFASKGMLDTADPDALAKISADPWEMRAKGLDYQLTPQEFAVALGHIAKRRGFKSAAKRVSTNAPSEDSKMLAALEKTKEQSAQYRTIGEMFARDPAYADRRRNRDGCFDRTMSREDLFKETQILFESQRRLGNFSATSETEQAFIDIAFRQKPMQDSERL

SEQ ID NO: 796 - protein, 400 aa, Acetobacter aceti
SFERFRLLCRLVNLRVTDGLEDRPLTPEELRLACEDAGKTRKLSVKKVRSLIGLRDDQRFTTIPPDQEQHDIAARTGDALTGTATFRAILGESFWRQLLPHPEQLDRAAWIISFHELTDTIISKLATIGLPSEVMELIRKALEDGKFSKFKGAASLSDKAARKLIPFLQEGLTYDKACQKAGYNHAASKFTHYDSIDTKAKFNSLMDDVRDSITNPVARKAISEGMKQVWAMRNQWGLPGAICIELARDVGNSAEKRREIESGIKKNTAQRERERQEAKEHLNQSDISSETLLRYRLWKEQGGRCCYTDQPITPSQLIASDNSVQVDHILPWSRFGDDSYLNKALCTAKANQEKKNRTPWEWIHNQKGVEAWNHFTAAVESRKETRGLKKRNFLLKSSKE

SEQ ID NO: 797 - protein, 376 aa, Acetobacter aceti
YAARVMAEAVRLLYPSGNRAEKGGVKRVFTRPGALTAALRHAWGVESLKKINGKRLNDDRHHALDAAVVAAVSEKEIQKLTKSFQICEQKGLARPMRDVPMPWEGFRHQLETAYADIRVARPERRRARGKGHDATIRQLREEKDGPVVYERRAISDLKLTDLERIKDPERNSAIISSLRTWIEKGKPADYPPQSPKGDEIRKIRVMSRNKPAVSVRGGTADRGEMTRVDVFTKMGKKGKPEWFLVPIYRHQVIDRIQWPQPPNQAAANGKSEKNWPTMGLEHEFRFSLYPRSYVQIVKRDGEIIEGYFAGLDRTVAAFSLLSSSDPTSIQRGIGAKTLESIRKYNVNRFGDISMVEQETRTWHGDVCISPDQPDSA

SEQ ID NO: 798 - protein, 1054 aa, Actinobacillus suis
MKLTPLNYILGLDLGIASVGWAVVEIDEQENPLGLIDVGVRTFDRAEVPKTGESLALARRLARSARRLVKRRADRIKKAKRLLKAENILLSADEHLPNDVWQLRVKGLDQKLERQEWAAVLLHLLKHRGYLSQRKNESKSENKELGALLSGVETNHQILQSAEYRTPAEIAVKKFHVEDGHIRNQRGAYTHTFSRLDLLAEMELLFQRQTDLGNPHTSAKLLENLTALLMWQKPALAGEAILKMLGKCTFEPTEYKAAKNSYSAERFVWLTKLNNLRILEQGAERALTDNERFALLDQPYEKAKFTYAQARTMLALPDEAIFKGVRYQGEDKKAVETKTILMEMKAYHQIRKALENADLKAEWNELKNNSELLDDIGTAFSLHKTDEDICRYLDGKLSESILNALLENLNFDKFIQLSLKALQQILPLMLQGQRYDEAVSAIYGDHYGKKSAEINRLLPTIPADEIRNPVVLRTLTQARKVINAVVRLYGSPARIHIETGREVGKSYQDRKKLEKQQEDNRKQRESAVKKFKEYFPNFVGEPKGKDILKMRLYELQQAKCLYSGKSLELHRLLEKGYVEVDHALPFSRTWDDSFNNKVLVLANENQNKGNLTPYEWLDGKNNSEHWQNFVARVQTSGFSHTKKQRILSHKLDEKGFIERNLNDTRYVARFLCNFIADNMLLTGKGKRKVFASNGQITALLRGRWGLQKVRDDNDRHHALDAVVVACSTVVMQQKITRFVRYEEGNVFSGERIDRETGEIIPLHFPSPWAFFRENVEIRIFSENPKLELENRLPDYPQYNHEFVQPLFVSRMPTRKMTGQGHMETVKSAKRLDEGLSVLKVPLTQLKLSDLERMVNREREVTLYESLKARLEQFGNDPAKAFAEPFHKKGGAVVKAVRVEQTQKSGVLVRDGNGVADNASMVRVDVFTKGGKYFLVPIYTWQVAKGILPNKAVTANVDEIDWLEMDESYQFIFTMYPNDLVKVKLKKEEFFGYYGGLDRATGAIVIKEHDLEKSKGKQGIYRIGVKLALSFEKYQVDELGKNIRPCRPTKRQHVR

SEQ ID NO: 799 - protein, 239 aa, Actinobacillus ureae
MEIRIFSENPKLGLENRLPGYPQYNHEFVQPLFVSRMPTRKMTGKGHMETVKSAKRLDEGLSVLKVPLTQLKLSDLERMVNREREDALYQSLKAHLEQFGNDPAKAFAEPFHKKGGTVVKAVRVEQTQKSGVLVRDGNGVADNTSMVRVDVFTKAGKYFLVPIYKWQVAKRILPNKAVTAGVDEIDWLEMDSSYQFIFTMYANDLVKVKLKKRSILGLLRWFRSCNWGYCYQRTRFREI

SEQ ID NO: 800 - protein, 400 aa, Actinobacillus ureae
MKLTPLNYILGLDLGIASVGWAVVEIDEQENPLGLIDVGVRTFDRAEVAKTGESLALARRLARSSRRLVKRRADRIKKAKRLLKAENLLLSADEILPNDVWQLRVKGLDQKLERQEWAAVLLHILKHRGYLSQRKNESKSENKELGALLSGVATNHQLLQTAEYRTPAEITVKKFQAEENGHGHIRNQRGDYSHTFDRKDLLAEMKLLFQRQAELGNPHTSEKLLENLTTLLLWQKPALAGEAILKMLGKCTFEPAEYKAAKNSYSAERFVWLTKLNNLRILENGIERALTDNERFTLLDQPYEKAKLTYAQARTMLALSDEAIFKGVRYQGEDKKAAEKVALIEMKGYQHIRKALEGAGLKAEWNELKNNSELLDDIGTAFSLYFSISNLPTEIAYFTP

SEQ ID NO: 801 - protein, 1113 aa, Actinomyces georgiae
MSASSQNVERIRYKVGIDVGLRSIGFCAVQVDADDRPVKLLNTVVHVHDAGVSPADAKKADTRKLVSGVARRTRRLYRTRKRRLVDLDRQLDGLGWPLVDPARFADPREPWFAREKLVSGRVDDADERKELLSVALRHIAHHRGWRNPYSTVESLQADAPPSEFLQGLNQRVSEKLGTELDPGLTQGQLVAKLLHRFPNAKIRGPEGILRGKLHQSDNAGELRLICRTQGLDCHITEELVRLVFQAKSPKANKEMRKRIGRDQLPGQGAHIRAEKAHPVFQRFRIVAVLANLRIREAHVDRRLTAEEMRTLTDFLLGLAGSEQPTWEELADNLNIERHQLRGTAKASVDGAPALRFPPIDATTDRIYASKLKWLAEWWRQADEERRGYMVDALSNSGGSEDEPYLDDEIAEMLEQASEEDQAKLDSLHLPGGRASYCLDTLRRLTDAMLGGGLDLFEARKAVFHVDDDWAPPTDPIGAPVGNPPVDRVLKHVARWLEAATGRWGAPQTINIEHVREGLGSEKAARELTRMNDRRRRNNQKLVEEMGEKLGMSGRIRRSDRMRYEAIRRQNCECLYCGQPITYQTMEMDHIVPRAGAASTNSRSNLAAVCRRCNHQKGKLPFAVWAESQDSPAEVRLQDAVQRVRHWLRDAGMGQKELQALRVQVIARLKSKRPDEEFDGRSMESIAWMANELRARVEAQYRGSGTTVRVYRGALTAEARKASGFEGRVNLIGGRGKDRFDRRHHAMDALVIALMNQSVAQTLALRLNMRDSQWLTQSEQTWRQFHGAPGEAARKWEAWDRDMRDASDLFNLALDGGRIPITENVRLRVGNGRVHEDGVIRFKPEYEVKGKTIKGGEARLLGDSLPSEQIDRAETPALWTALTRLPEYDRKSGLPENPDRVIRVNGAVVQATDRIRFFGTPASVAVRGGYAKLGESIHHARIYRINGKTPKYAMIRVYTIDLMRLNHEDIFTAVLKPSTISMRCAEKKLKYAIAEGNAEQIGWLVEGDQLELDAAAYAKGVGADLMREYPMATCWRVAGFPDEAKLRLRPVLLAAEGMGEDAPKFMREVLENQGWRPAVNALLSPGSVRVVRRNVLGEPRFKSSGHLPTTVDLV

SEQ ID NO: 802 - protein, 1101 aa, Actinomyces naeslundii
MWYASLMSAHHLRVGIDVGTHSVGLATLRVDDHGTPIELLSALSHIHDSGVGKEGKKDHDTRKKLSGIARRARRLLHHRRTQLQQLDEVLRDLGFPIPTPGEFLDLNEQTDPYRVWRVRARLVEEKLPEELRGPAISMAVRHIARHRGWRNPYSKVESLLSPAEESPFMKALRERILATTGEVLDDGITPGQAMAQVALTHNISMRGPEGILGKLHQSDNANEIRKICARQGVSPDVCKQLLRAVFKADSPRGSAVSRVAPDPLPGQGSFRRAPKCDPEFQRFRIISIVANLRISETKGENRPLTADERRHVVTFLTEDSQADLTWVDVAEKLGVHRRDLRGTAVHTDDGERSAARPPIDATDRIMRQTKISSLKTWWEEADSEQRGAMIRYLYEDPTDSECAEIIAELPEEDQAKLDSLHLPAGRAAYSRESLTALSDHMLATTDDLHEARKRLFGVDDSWAPPAEAINAPVGNPSVDRTLKIVGRYLSAVESMWGTPEVIHVEHVRDGFTSERMADERDKANRRRYNDNQEAMKKIQRDYGKEGYISRGDIVRLDALELQGCACLYCGTTIGYHTCQLDHIVPQAGPGSNNRRGNLVAVCERCNRSKSNTPFAVWAQKCGIPHVGVKEAIGRVRGWRKQTPNTSSEDLTRLKKEVIARLRRTQEDPEIDERSMESVAWMANELHHRIAAAYPETTVMVYRGSITAAARKAAGIDSRINLIGEKGRKDRIDRRHHAVDASVVALMEASVAKTLAERSSLRGEQRLTGKEQTWKQYTGSTVGAREHFEMWRGHMLHLTELFNERLAEDKVYVTQNIRLRLSDGNAHTVNPSKLVSHRLGDGLTVQQIDRACTPALWCALTREKDFDEKNGLPAREDRAIRVHGHEIKSSDYIQVFSKRKKTDSDRDETPFGAIAVRGGFVEIGPSIHHARIYRVEGKKPVYAMLRVFTHDLLSQRHGDLFSAVIPPQSISMRCAEPKLRKAITTGNATYLGWVVVGDELEINVDSFTKYAIGRFLEDFPNTTRWRICGYDTNSKLTLKPIVLAAEGLENPSSAVNEIVELKGWRVAINVLTKVHPTVVRRDALGRPRYSSRSNLPTSWTIE

SEQ ID NO: 803 - protein, 1181 aa, Actinomyces sp.
MLHCIAVIRVPPSEEPGFFETHADSCALCHHGCMTYAANDKAIRYRVGIDVGLRSIGFCAVEVDDEDHPIRILNSVVHVHDAGTGGPGETESLRKRSGVAARARRRGRAEKQRLKKLDVLLEELGWGVSSNELLDSHAPWHIRKRLVSEYIEDETERRQCLSVAMAHIARHRGWRNSFSKVDTLLLEQAPSDRMQGLKERVEDRTGLQFSEEVTQGELVATLLEHDGDVTIRGFVRKGGKATKVHGVLEGKYMQSDLVAELRQICRTQRVSETTFEKLVLSIFHSKEPAPSAARQRERVGLDELQLALDPAAKQPRAERAHPAFQKFKVVATLANMRIREQSAGERSLTSEELNRVARYLLNHTESESPTWDDVARKLEVPRHRLRGSSRASLETGGGLTYPPVDDTTVRVMSAEVDWLADWWDCANDESRGHMIDAISNGCGSEPDDVEDEEVNELISSATAEDMLKLELLAKKLPSGRVAYSLKTLREVTAAILETGDDLSQAITRLYGVDPGWVPTPAPIEAPVGNPSVDRVLKQVARWLKFASKRWGVPQTVNIEHTREGLKSASLLEEERERWERFEARREIRQKEMYKRLGISGPFRRSDQVRYEILDLQDCACLYCGNEINFQTFEVDHIIPRVDASSDSRRTNLAAVCHSCNSAKGGLAFGQWVKRGDCPSGVSLENAIKRVRSWSKDRLGLTEKAMGKRKSEVISRLKTEMPYEEFDGRSMESVAWMAIELKKRIEGYFNSDRPEGCAAVQVNAYSGRLTACARRAAHVDKRVRLIRLKGDDGHHKNRFDRRNHAMDALVIALMTPAIARTIAVREDRREAQQLTRAFESWKNFLGSEERMQDRWESWIGDVEYACDRLNELIDADKIPVTENLRLRNSGKLHADQPESLKKARRGSKRPRPQRYVLGDALPADVINRVTDPGLWTALVRAPGFDSQLGLPADLNRGLKLRGKRISADFPIDYFPTDSPALAVQGGYVGLEFHHARLYRIIGPKEKVKYALLRVCAIDLCGIDCDDLFEVELKPSSISMRTADAKLKEAMGNGSAKQIGWLVLGDEIQIDPTKFPKQSIGKFLKECGPVSSWRVSALDTPSKITLKPRLLSNEPLLKTSRVGGHESDLVVAECVEKIMKKTGWVVEINALCQSGLIRVIRRNALGEVRTSPKSGLPISLNLR

SEQ ID NO: 804 - protein, 1120 aa, Actinomyces sp.
MNAMKQYNAGIDVGINSVGFAAIEVDSKGLPLNILNNMVVLHDSGVDPGTAKTGATRLANSGTARRTRKLIARRRKRLQKLDRYIEVQGWPLVDFSSLPDPYTPWKIRAKLTQDRLEGEEQGRGLSIALRHMARHRGWRNPYEGVESLHSPKEASKQFKDLKDRVTKVSGVIFDEDATPAEVVCDIGLSPKQRLRSAPSAKYKEGATLADEPVGGKSKEGLLGGKLMQSDNANELRKIGIVQGLSNEKVNEIIDQVFASESPKGQAGKRAKKDELPGQEQYVRALRAHLAFQRFRIVAAVANLRILEAEPKHERLLSQSEKDKVIEFLMSADGDDGVTWSDVAEELGIERECLSGTAKRGADGERPSSFPPTNSTNISIVRSKVKPLIEWWRKASDDEQATLVTALSNADELTDDQPSAETVRQFLSSPDEQSQEKIDKISLPKGRAAYSVNSLERLTRRMLKDSVDLFEARKREFGVDNNWTPTPDSIGEPVGNPAVDRVLKIVNRWLLAVTRKWGPPKVVNIEHVRVGFTSAAQTRKYEEENKTNRERNLAILEELRDKFGTSGKIRREDITRFAALRRQNCQCAYCGEAITFFDCEMDHIVPRKGPGSTNTRNNLVAICERCNKSKSNMPFSLWAQNCDIPGVSVEAVIDRVRTWIKDPELNPKQYNNFKKDVIERLRKTVDDDAIDNRSIESVAWMATELADRIGSHFRTAGANTKVRVYRGWLTSEARKASGFEGKINLIGGRGKTRLDRRHHAMDAATIALMRQSVAQTLVERASIRESDRLRRVVSSSWKDYRGADRDKQFSYGSWLNSMNALAELFNRAIDADGIPVTQNLRLRLGNGEAHDATIRSLEKKRVGASWTIGEIDRASTPQLWLALTRQEDFDQNDGLPANASRELRVKNHWFHAEENVTLFPTKSAAIAVRGGYAEIGNTIHHARLYKLPGKKLTYGMIRVFAIDLLCAWHTDLFSSPLLPESISLRTAETKVRRAVEDGAAMYIGWLVDGDEIVLDPETKAFKSNKIGEYLCEFPGTKRWKVDGFPDKEKLRLRPLQLAGEGLPEDVSAGTEEILGPKGNGWRVAINALFKSSQLVVVRRTALGMVRKLSRRHLPLTTRLRG

SEQ ID NO: 805 - protein, 1095 aa, Actinomyces sp.
MPAHHLRVGIDVGTHSVGLATLRVDDQGTPIELLSALSHIHDSGIGKEGQKDHDTRKKLSGVARRTRHLLRNRRERLQQLDKVLVDLGFPIPKPEEYPDLSERTDPYRVWRVRARLVEETLPEELRGPAISMAVRHIARHRGWRNPYSKVESLLSPAEESSFMKALRKRIMTKTGEVLDDDITPGQAMAQVALTHKIYMRGPEGILGKLHQSDNANEIRKICARQGISSDVCKQLLRAVFKAESPRGSAVSRVAPDPLPGQGSFRRAPKCDPEFQRFRIISIVANLRISETKGENRPLTVDERRQVVAFLMEDSQADLTWVDVAEKLRVSRQALRGTAMLTADGERSAAQPPIDVTDQIMRKTKISALKTWWDKADAERRGAMVRYLYEGLEDSECAEVIAKLPEKDHAKLDSLHLPAGRAAYSRESLTALSDHMLETTNDLHEARKRLFGVDDSWAPPAEPVGAPVGNPSVDRTLKIVARYLSAVESIWGTPEVIHVEHVRDGFTSERTAEERDKANRSRHNDNQKAIEKIQHDYGKEGYISRGDIVRFHALKLQGSACLYCGTTIGYHTCQLDHIVPQAGPGSNNRRGNLVAVCERCNHSKSNTPFAVWAQKCGIPHVGVKEAISRVNGWVEHNHSTSSGDLTRLKKEVIARLRRTQKDPEIDERSMESVAWMANELHHRIAAAYPETTVMVYRGSITAAARKAASIESRINLIGEKGRKDRLDRRHHAVDASVVALMEPSVAKTLAERSSLRGEQRLTGQEQTWKQYTGLTVGARERFEAWRGHMHRLTELFNESLAADEVYVTQNIRLRLSDGSAHTVKASKLVSHRLGDGLTVQQIDRACTPALWCALTREIDFDEKNGLPAREDRVIRVHGQEISSADCIQVFSKRKKTKSDRDEAPFGAIAVRGGFVEIGSSIHHARIYRIEGEKPAYAMLRVFTHDLLSQRHGDLFSAVIPPQSISMRCAATELRQAISEGRATYLGWIVSGDELHIPVETFTTHKIGSFLKDYPNTTRWRICGYDSETMLILKPRILSAEGLNNSSDIAEYVIKNKGWRVAINKLAKVHPTVVRRDALGRPRHSSRSNLPVTWSIE

SEQ ID NO: 806 - protein, 1144 aa, Actinomyces sp.
MSMIDSSENVPGIRYRVGIDVGLKSIGFCAVEVDRNDQPVRMLNSMVFIHDAGVDPNENKAAKSRKLTAGVARRTRRLYRTRHQRLVNLDRVLSKEFGWPLPDLTSFKDPREPWHVRAGLLEGYIADDEKRKEALSIALRHIARHRGWRNPYAKVETLLQPSEPSDFLKGLNDRISEELGRAFPADATPGQLVDTYLAHPDYVGRAGTPKLRGPQGILAGKLHQSDNAQEIRGICDVQRIEPAERDRLIRVVFEAKSPKGSAKERGLVGYDELPGQGRHVRAEKAHPAFQLFRMVSVLANLRIREGREERPLTPDELEDLVDFINQVSLKQEVTWQDLADKLRIERADLRGTAKASFDGSPVLRNPPTDVTTEKIMACKVKWLKEWWKEADDEQRGYMVDAFSNSGGSEDGTDVNDEVAELLEQATEDDQLEFEKISLPQGRAAYSLDSLRRLTDRMLRDGVDLHTARRLEFNVGDDWKPAVEPIGAPTGNPAVDRVLKQVSRWLHAATERWGEPTVINIEHARDGLGSERVARELMRENEKRRKANASAVAEMAAKLKLSGKVHRSDQIRYFALQRQNCQCLYCGAPITYTTAEMDHIVPRADGSSTNDRSNLAAVCRTCNHMKGKIPFAVWASSDKANQGVSLTGALERVNMWQRDSGMSPRQLKQLQREVCARLKSKKPDQEFDGRSMESVAWMAVELRTRIEGFYRSRDEESVPSVGVYRGQLTAEARRASGFESRVNLIGGRGKTRFDRRHHAMDALVIALMNPSVSRTLALRLNMRDAQRLTGVEETWKHFYGKPGEASKRFESWRESMLRGVELFNIALSDNAIPFVENIRLRVGSSVIHDATVHSFCPPKTPDGKQIITKGYGEQHSLGSAMPVELIDRAETPALWTALTRCPDFDPKKGLPENPQRTISVNGTRVGPTELVNFFEFSKSGPKACLKVRGGYVDLSGAIHHARIYRIAGKKTAYAMIRVFQVDLLRLKDHDVFTTPLKPSTISMRTAEPKIREALANGTATQIGWLVEGDELVIDTSKYSGGFIGEVLARYPEATSWRVAGFMTPAKLRIKPILLSKEGFVDETQAALLGVEVTSEAIQKTVDRPGWLPAVNVLFGAGGVRVIRRNCLGEERYHSSASLPVSMTLE

SEQ ID NO: 807 - protein, 1103 aa, Actinomyces sp.
MTKINDDLRYRVGIDVGLKSIGFCAVEVDENDQPLRLLNSMVFVHDAGVDPNENKAAKSRKLTAGVARRTQRGTAQNRRRLAELDRALSEELNWPLPNLEDFEDSYEPWHTRAELVEHYIKDDAERAEALAIAIRHIARHRGWRNPYLSVDSLLTPQEPSKFLRGLNERVTQALGREFPADATPGQLICAYIDSPKYAETQGIRGDSGILSGKLHQFDNVGEIRKICEVQRLDHDVFKLLVRKVFFAKSPRGSAAGLVGHDQIPGQGKYIRAEKAHPDFQLFRIVAVLTNLRIREGKAERCLTPDELRGLVDYILEVQLKQQVTWADLADNLGIERTDLRGTARASFDGSPALRFPPTDVTAEKIMASKVKWLKDWWDKADSERRGFMVDALSNSGGSTGDNDIDDEVAALLEAATEDEQAELEKIQLPQGRAAYSLDSLRRLTKRMLEEGVDLHTARKEEFNVDDDWRPEPEPIEAPVGNPAVDRVLKQVARWLNMATDRWGVPDVINIEHTRDGLGSEKVARELLRESQKRQDLNQKDMDKMIRELGISGKARRSSLIKYQAIQRQNSMCLYCGTEIGFETAEMDHIVPRALSGSTNDRSNLAAVCRACNHQKGAVPFAVWATSGEAHAGVSLEDAIKRVRLWQKGPGMSPKQHKAFQNEVISRLKSRKPDEEFDGRSMESVAWMAVELRTRIDGYYRKVNSDSVPKVGIYRGQLTAEARKASGFENRVNLIGGKGKTRFDRRHHAMDALVIAMMNQSVSQTLALRVNMRESQRITGQEETWKNFYGKPGQASERFEKWREGMLRAVELFNIELAKNAIPFHENVRLRVGSSKVHDDTVRKFIHAKLGEALSVAMIDCAETPALWTALTRLPDFDPKDGLPEDLSREIYIHSRKITADEQLNFFNSPSACLKVRGGYVEIGSSIHHARVYRIDGKKTTYSMVRVFATDLVKMTHEDVFTTPLKPSTISMRTADPKIRKALADGTATQIGWLVEGDELQLETDKYSGGLIGEVLAEYPQLTSWRVAGFYGVTQLRLRPYMLAAEGIPSDASESLRKVIEGKGWLPAINALLSSGCVKVVRRNCLGEPRFNAKSSLPVSQLLR

SEQ ID NO: 808 - protein, 1114 aa, Actinomyces turicensis
MQFHFYMVYVTMKGMNDKDASQQLRYRVGIDVGTHSIGFCAVEVDESGMPIQLLNSMVHKHDSGIDPGGNDTATTRLAEAGVARRTRRLIRRRKKRLQELDAFIEECGWPLVDLATITDARSPWRIRAHLATEHIDDEAEQGKLLSIALRHMARHRGWRSPYARISSLHIQADPSEQLKALAQRVSEKTGISLTADQTPAQLISVYLDVFETGKLRGPEGILGGKLMQSDNANELRRIATVQGLDNDLLKKIIGFVFAAESPKGSAAKRVGKDVLPGAHGLRAEKAHPAFQQFRIVSIVQNLRIKEGTGLRALTSEETEIVVDFLNQAGLTEAPTWEEVADNLEIPRSHLKGTATEGFDGIAPSTRPPFDVTSQKILNGKLKKLSAWWKDADYDHRCAMVNALSNVGSDDEGSLADDDVREFLSDFTDEELEALDKVELPGGRAAYSVDSLEKLTNTMLSEGCDLHSARKIAFGVDDSWTPPAEPIGQPVGNPAVDRVLKQVARWISAATNQWGTPESVNIEHVRDALGSEKASREYQRSLQTRRIRNEKLFAEMRERLDIGGKPRRSELTRYLALQRQNCQCLYCGMPITYTDAEMDHIVPRKGAASTNTRENFAAVCRACNHQKSNLPFAVWAEKTERPGVSVKEAYKRVSDMRIEPGMNGRQMNEFRKAIRLRLTTKHADAEIDGRSLESVAWMANELRHRIEGFYRSAENDVTVRVFRGAVTAEGRRASGFESRVNLIGGKGKTRLDRRHHAMDALTIALMEPGIAQTIALRMNMRESQRVLGEQETWKSFTGGSDTARKRWEHWCEEMLRASELFNVFLAEDRIPICQNKRLRLGSSAVHKAIVQPFEASDKRIVSDAMPVELIDRASTPALWTALTRDPDFDPKEGLPANPSRTIRLHDKRLGPNETVEFFPTAAACLAIRGGYCEIGAGIHHARIFRISGKKTTYAMLRVYQCDLVRFQKENLLTVELPANTISVRTAVPKLREALAHGTAEQIGWLVVGDELKIDLSGFTTGQIETFNETYPQATRWEVTGFPTKTQLRLKPLLIASEGLADDVPDDIVKIVKGPGWWPAIDKLLKIGNVVLYRRDTHGKPRVVSHRSLPLSSKLQ

SEQ ID NO: 809 - protein, 1113 aa, Alcanivorax sp.
MRYRVGLDLGTASVGAAVFSMDEQGNPMELIWHYERLFSEPLVPDMGQLKPKKAARRLARQQRRQIDRRASRLRRIAIVSRRLGIAPGRNDSGVHGNDVPTLRAMAVNERIELGQLRAVLLRMGKKRGYGGTFKAVRKVGEAGEVASGASRLEEEMVALASVQNKDSVTVGEYLAARVEHGLPSKLKVAANNEYYAPEYALFRQYLGLPAIKGRPDCLPNMYALRHQIEHEFERIWATQSQFHDVMKDHGVKEEIRNAIFFQRPLKSPADKVGRCSLQTNLPRAPRAQIAAQNFRIEKQMADLRWGMGRRAEMLNDHQKAVIRELLNQQKELSFRKIYKELERAGCPGPEGKGLNMDRAALGGRDDLSGNTTLAAWRKLGLEDRWQELDEVTQIQVINFLADLGSPEQLDTDDWSCRFMGKNGRPRNFSDEFVAFMNELRMTDGFDRLSKMGFEGGRSSYSIKALKALTEWMIAPHWRETPETHRVDEEAAIRECYPESLATPAQGGRQSKLEPPPLTGNEVVDVALRQVRHTINMMIDDLGSVPAQIVVEMAREMKGGVTRRNDIEKQNKRFASERKKAAQSIEENGKTPTPARILRYQLWIEQGHQCPYCESNISLEQALSGAYTNFEHILPRTLTQIGRKRSELVLAHRECNDEKGNRTPYQAFGHDDRRWRIVEQRANALPKKSSRKTRLLLLKDFEGEALTDESIDEFADRQLHESSWLAKVTTQWLSSLGSDVYVSRGSLTAELRRRWGLDTVIPQVRFESGMPVVDEEGAEITPEEFEKFRLQWEGHRVTREMRTDRRPDKRIDHRHHLVDAIVTALTSRSLYQQYAKAWKVADEKQRHGRVDVKVELPMPILTIRDIALEAVRSVRISHKPDRYPDGRFFEATAYGIAQRLDERSGEKVDWLVSRKSLTDLAPEKKSIDVDKVRANISRIVGEAIRLHISNIFEKRVSKGMTPQQALREPIEFQGNILRKVRCFYSKADDCVRIEHSSRRGHHYKMLLNDGFAYMEVPCKEGILYGVPNLVRPSEAVGIKRAPESGDFIRFYKGDTVKNIKTGRVYTIKQILGDGGGKLILTPVTETKPADLLSAKWGRLKVGGRNIHLLRLCAE

SEQ ID NO: 810 - protein, 1146 aa, Alicyclobacillus hesperidum
MAYRLGLDIGITSVGWAVVALEKDESGLKPVRIQDLGVRIFDKAEDSKTGASLALPRREARSARRRTRRRRHRLWRVKRLLEQHGILSMEQIEALYAQRTSSPDVYALRVAGLDRCLIAEEIARVLIHIAHRRGFQSNRKSEIKDSDAGKLLKAVQENENLMQSKGYRTVAEMLVSEATKTDAEGKLVHGKKHGYVSNVRNKAGEYRHTVSRQAIVDEVRKIFAAQRALGNDVMSEELEDSYLKILCSQRNFDDGPGGDSPYGHGSVSPDGVRQSIYERMVGSCTFETGEKRAPRSSYSFERFQLLTKVVNLRIYRQQEDGGRYPCELTQTERARVIDCAYEQTKITYGKLRKLLDMKDTESFAGLTYGLNRSRNKTEDTVFVEMKFYHEVRKALQRAGVFIQDLSIETLDQIGWILSVWKSDDNRRKKLSTLGLSDNVIEELLPLNGSKFGHLSLKAIRKILPFLEDGYSYDVACELAGYQFQGKTEYVKQRLLPPLGEGEVTNPVVRRALSQAIKVVNAVIRKHGSPESIHIELARELSKNLDERRKIEKAQKENQKNNEQIKDEIREILGSAHVTGRDIVKYKLFKQQQEFCMYSGEKLDVTRLFEPGYAEVDHIIPYGISFDDSYDNKVLVKTEQNRQKGNRTPLEYLRDKPEQKAKFIALVESIPLSQKKKNHLLMDKRAIDLEQEGFRERNLSDTRYITRALMNHIQAWLLFDETASTRSKRVVCVNGAVTAYMRARWGLTKDRDAGDKHHAADAVVVACIGDSLIQRVTKYDKFKRNALADRNRYVQQVSKSEGITQYVDKETGEVFTWESFDERKFLPNEPLEPWPFFRDELLARLSDDPSKNIRAIGLLTYSETEQIDPIFVSRMPTRKVTGAAHKETIRSPRIVKVDDNKGTEIQVVVSKVALTELKLTKDGEIKDYFRPEDDPRLYNTLRERLVQFGGDAKAAFKEPVYKISKDGSVRTPVRKVKIQEKLTLGVPVHGGRGIAENGGMVRIDVFAKGGKYYFVPIYVADVLKRELPNRLATAHKPYSEWRVVDDSYQFKFSLYPNDAVMIKPSREVDITYKDRKEPVGCRIMYFVSANIASASISLRTHDNSGELEGLGIQGLEVFEKYVVGPLGDTHPVYKERRMPFRVERKMN

SEQ ID NO: 811 - protein, 1552 aa, Anaerophaga sp.
MFSQRNNPYCELLQNVKQLYKEKFGKTNQVDNSIIYGFMKRILGLDLGTNSIGWALVENDENDRKGKIIGMGSRIIPMDMSELDNFNKGASISKTAERTRLRMTRRLRERHLLRRARLHRILNIMGFLPEHYRNSIDFIDKKGCFFEGQEPKIAYKPDKNSEQFCFLFTSSFHEMLEDFRKFQPELIQNRKKVPYDWTIYYLRKKALTQKISKEELAWIILNFNTKRGYYHLRGEDEDNQDNKKIKEFRALKVVNVTEREGANSSGKKWYDMELENGWVYSRQSNLPPNLEGKTIELIVSYTLDNNGNIKKDKNGKEKYSLSMPGEEDWNLVKIKTENDLKTSKKSVGEYIYDHLLKNPDQKIRGKLISTIERKFYKEELSRILKTQMNFYEELKNRELYQKCVEELYPNNKSHQQTLLQKDFIHLIVEDIIFYQRPLKSKRAFVNNCPLEYRVYVDKKSGELIKSGVKCIPKSHPLFQEFRLWQYVRNLRIYERERMVNGRLMVNVDVTNELLPDEEHIVRLFDLLNDRKSFKQDDVLRFVGIKSPKDRKRYSWNYPEDKELPGNETRHLILAWLKKVDGVPEDWLDPEKLKALWHLLYSVTDREEIIKGLHSFAKKYELPDTFVEHFKKIPRLEREYGSFSEKAIKKLLPLMRMGKYWKAEEIPADLLEKAQKIIDAEADDRISDEVREKLLHLKDISQLKGLPLWQASYLVYGRHSETGEVVKWRTSEDLEKYILQFKQHSLRNPVVEQVILEALRVVKDIWEHYGEGKEGFFNEIHVEIGRELKNPADKRKKITSQIQENENTNLRIKALLEELFNDPSVKNVRPYSPAQQEILRIYEDGVLNGQKEIPDDILKISKMARPSKSQLVKYKLWLEQKYRSPYTGEIIPLSQLFTSAYEIEHIIPQARYFDDSFSNKVICEAEVNREKGHQLAFEFITKRGGDEIELNFGKKVTILNVEEYQKFVKDHYGRSLRSLSKMRKLLMEDIPDDFIDRQLNDSRYISKVVRNLLSNIVRAEDENSLVSKHLITCTGGVTTRLKHEWGLNDVWNELITPRFVRLNKMGKEKFGEWINKKGKQVFQIQMPLELQKGFNKKRIDHRHHALDALVVACASRSHVNYLNNDSARANASETRYDLRNKLCYKDKTDSNGNYRWKFYKPWESFTEEAKNRLAGTVVSFKSNRRIMTRSSNRYFKWVDTSEGKKKKLVRQIKGDNQAIRKPLHKDTVLGKVSLRKEKKVSLSKAIDLWESIVDKPLKKRIQSLREQGYDKKLLLKYFKDRNNQFNGQDISRVNIYFFDNNLAARRVTLDASFNSEKRIDGITDSGIKKILYAHLQNEKYHGKKDEKGNEISPYELAFSPEGLEEMNANIKKLNGGKPHCPIYKVRLAETIGEKFKLGEKGNKNKKYVEAAKGTNLFFAVYVDEKGVRSFETIPFSVALERRKQKLAVVPEENENKEKLLFYLSPNDLVYVPDEDEKLIDYRQLSINPTRIYKMVSSSGTQCFFIPHFVASPIVQTMELGPNNKSERAWDGQMIKNVCYKLSVDRLGNVKIEK

SEQ ID NO: 812 - protein, 1515 aa, Anaerophaga thermohalophila
MKRILGLDLGTNSIGWALVESDEEQKSGKIQGIGSRIIPMDQNELDNFNKGNTVSQTAERTRLRMVRRLRERHLLRRERLHRVLKEIGFLPEHYLEQIDFTEKPGGFLPGKEPKIAYKPDNFKDKYDFLFQDSYHEMLSDFQDKNPEFIQKRKKVPQDWTIYYLRKKALTAKITKEELAWIILNFNQKRGYYQLRGEDEDVAKNTKKEEFHALKVVKVKEREDSEGASGKWYDIELENGWVYPRQSNIRPDWEGKILELIVTYNLDKDGNIKTDKEGNEKRSFRMPNKDDWTLRKKRTENEIEKSGKTVGEYIYDNLLDAPDLKIRGKLVSTIERKYYRSELEQILTAQKKYHPELSNSELFNKCISNLYPNNDIHRKALLSKDFVHLIINDIIFYQRPLKSKRSTVSNCPLEYRVYVDKVTGEKKKVPLKCIPKSHPLYQEFRLWQYVKNLRLFEKERFENGRLLTNVDVTEQFLPDEDKYVELFEFLNGRKTFKQDDILKFAGIKSAKDRVKYYWNYPQEKEYPGNETRYLIESRLKKIENVPDEWLNYEKIEELWHLLYSVTDKVEIEKGLQSFAAKYQLPDLFVEVFKGFPRMEREYGAFSKKAIKKLLPLMRMGKYWKLENINPDLIEKVQKIIDGEADDNINDGIRERFSEINEMSDLRGMPLWKASYLVYGRHSEAAEVIRWRTSADLDQYIKDFKQHALRNPIVEQVVLEALRVVKDVWNYFGEGREKFFDEIHVEIGRDLKNPADKRQKIANQIQENENTNLRIKALLVELFNDPEVQNVRPYSPVQQQLLKIYEDGVLNAERDIPDDIQKISRMANPTRNQLIRYKLWLEQKYRSPYTGEIIPLNKLFTSEYEVEHIIPRARYFDDSFSNKIISEAEVNRKKDRMLAFEFIKKLGGSTIDLNYGKKVSVLTVEEYQQFVKDHYGINPHSRLKMQKLLMDEIPESFIERQLNDSRYISKMVRNLLSNIVREENENSPVAKQLITCSGSITNTLKQEWGLNDVWNTIITPRFERLNKMGEQKYGEWVNKEGKPVFQIQMPLELQKGFNKKRIDHRHHALDALIVASATRSHVNYLSNEAAKTNAKDTRFDLRNRLCYKEKRGQNRNFTWRFYKPWNTFTEDAKNALNDIVVSFKSNHRVINKSTNRYFKWENLPGGMKKKRLVRQEKGDNWAIRQSLHKDTVLGKVSLRKVKPVSLSVALDSWNNIVDKALKKKIRSLKDQGYDKKLMLKYFKDRRNEYNGENISRVNVYYFDEEMAARRVDLDTSFNSEKRIEGITDSGIKKIIYAHLKNEKYHGQKDDKGKDISPYELAFSPEGIAEMNANIKQLNGGKPHCPIYKVRLAEPVGEKFQLGETGNKTEKLVEVAKGTNLFFGVYANDEGVRSFATVPFYLAVEREKQGLPAVPQENENGDQLLFWLSPNDLVYVPSEEDAHFANPKQIELDNSRIYKMVSSTGTQCFFIPHFVATPIVQTIELGPNNKSERAWDGQMIKKVCYKLSVDRLGNVEIE

SEQ ID NO: 813 - protein, 333 aa, Bacillus cereus
MMNPNNFTKEDFWRTIILYGLNQATYKIALGQSLIRFSEQQRNVVSMNELAEDFFDMYLERLKNGKPQLATPNRQTAMERIINSYNIGRLTRSQAIEKVEREAFNDVIDRFHTVDSLQVPMKFYEKTDKGIVIFDNVFEIFSDNNNFELRNELDARWDLLESAFEIKRTDSQLVNDIRKLYLANGYERTDITKNRSVLNGYQSNVCFYCGELMSDDDVHVDHVIPRQLINHDDIWNLVLSHGFCNQQKSDNLPDVNYIEKLIERNEYFIKSNHPISNKLKERLGNTPRRRRTTIDRIYEHAKLVLAPWKGIYGYNPATDPFYKTFIRNIVLSK

SEQ ID NO: 814 - protein, 1068 aa, Bacillus cereus
MRYVLGLDIGIASCGWAVINQEKERIEDLGVRIFDKAENPKDGKSLAAPRRDARSTRRTLRRKKHRMQRIKILLVKQGLLFKTELNHLYESATEFDVWNLRLDALERKLHPKEFARVLIHLAKRRGFKSNRKETTLSENGQILESISENQQIMEQQNYRTVGEMILKDKKFENHKRNKDGTYIGTVTRQQLQDEIQMIFHTQRLYKNDYATEEFESSYLEIWASQRPYASKDQIEKMIGYCTLEPKEKRTPKASWSFQYFVALQTINNLRLISKDKIEELSFEEKKQIMNLALEKPIVKYIDIRKLLSIPNDFQFNSLSYSADTVDTTLENKRCIELKEYHSINKVYKQVYGKNTPNLLPIDYDTIAYGLTIFKDDKDILEYLQNKYVNAKGKPIKNLAKKTYDDTFIQALLNLNFTKMGHLSFKALKNIIPFLEEGLSYDKACEKAGYNFKGTSYTERTKYLPVIPQNTNPVVHRALSQTRKVINAIIKKYGSPNAIHIETARELSKTFQERKEIDSRYQDNSKKNEHAIHKLKELGNINPSGINIVKFKLWSEQDGRCMYSGKYIEPHRLFEEGYTEVDHILPYSRSLDDSYNNKILTLGTENQRKGNKTPYEYMGNTSIWDEFETRVQSNKKINFKKQQKLLLQNFSYAREQEFIERNLNDTRYATIYLTSLIQQHLIFSESSSKKKVRTVSGIITSHLRSRWGFNKDRKEGHIHHALDAVIVAVTSNHMIQRVTKYYKLKELNKNLQAKQLPFPEPWEGFRLELEARISPNTQQYLKGIHFKNYADVNLSDIKPIFVSRMPKRSITGELHQETIRKFLGYNEKGKVLTAIKTKLEDIPFDANGDFPMYGKETDLYTYNAIKERYLSHEKDKRKSFQEPLYKPTKSGEIGPLIKSIKIMDTRTIVNPVNQGKGVVYNSKIARTDVFKKEDKYYLIPIYTIDLLKNILPHKAITAGKGYEDWTTIDSSFTFLFSLFPNDLIQIVPSKNKTIKARTTVSKKEILLPSLTGYFKGVHSGTAGITVETHDGSVIANVGSKQLLLFEKYQVDVLGHYTKIKEEKRMGMAI

SEQ ID NO: 815 - protein, 1078 aa, Bacillus cereus
MRYVLGLDIGIASCGWAVINQEKERIEDLGVRIFDKAENPKDGKSLAAPRRDARSTRRTLRRKKHRMQRIKVLLVKHGLLSKTELDHLYESATEVDVWNLRLDALERKLYPKEFARILIHLAKRRGFKSNRKETTLSENGQILESISENQQIMEKQNYRTVGEMILKDKKFENHKRNKNGTYVGTVTRQQLQDEIQMIFHAQRLYKNDYATEEFESSYLEIWASQRPYASKDQIEKMIGYCTLEPKEKRAPKASWSFQYFVALQTINNLRLISKDRIEELSFEEKKQIMNLALEKSIVKYIDIRKLLSVPNEFQFNSLSYSADTVDTAVESRKCIELKEYHSINKVYKQIYGENALNLLPKYYDTIAYGLTIFKDDKDILEYLQNKYVNAKGKPISNFANKTYDDTFIQALLNLNFTKMGHLSFKALKNIIPFLEEGLSYDKACEKAGYNFKGTSYTEQTKYLPVIPQNTNPVVHRALSQTRKVINAIIKKYGSPNAIHIETARELSKTFQERKEIDSMYQDNSKKNEHAIHKLKELGNINPSGINIVKFKLWNEQDGRCMYSGKYIEPHRLFEEGYTEVDHILPYSRSLDDSYNNKTLTLGTENQRKGNKIPYEYMGNTSIWNDFETRVQSNKKINKKKQQKLLLQHFSYAREQEFIERNLNDTRYATIYLSSLIQQHLIFSESSRKKKVHTVSGIITSHLRSRWGFNKDRKEGHIHHALDAVIVAVTSDHMIQRVTKYYKLKELNRNLQAKRMPFPEPWEGFRLELEARISPNTQQYLKGLRFKNYADVNLSEIKSIFVSRMPKHSITGELHQETIRKFIGYNEKGKVLTAIKTKLEDIPFDANGDFPMYGKESDLYTYNAIKERYLSHKKDKRKSFQEPLYKPTKSGGIGPLIKSIKIMDTRTIVNPVNQGKGVVYNSKIARTDVFKKEEKYYLIPIYTIDLMKNILPQKAITAGKGYEDWTTIDPSFTFLFSLFPNDLIQIVPSKNKTIKARTTVSKKEVLLPSLTGYFKGVHSGTAGITVETHDGSVIANVGSKQLLLIEKYQVDVLGNYTKIKEEKRIGLTTYNDNKKIAAC

SEQ ID NO: 816 - protein, 1088 aa, Bacillus smithii
MNYKMGLDIGIASVGWAVINLDLKRIEDLGVRIFDKAEHPQNGESLALPRRIARSARRRLRRRKHRLERIRRLLVSENVLTKEEMNLLFKQKKQIDVWQLRVDALERKLNNDELARVLLHLAKRRGFKSNRKSERNSKESSEFLKNIEENQSILAQYRSVGEMIVKDSKFAYHKRNKLDSYSNMIARDDLEREIKLIFEKQREFNNPVCTERLEEKYLNIWSSQRPFASKEDIEKKVGFCTFEPKEKRAPKATYTFQSFIVWEHINKLRLVSPDETRALTEIERNLLYKQAFSKNKMTYYDIRKLLNLSDDIHFKGLLYDPKSSLKQIENIRFLELDSYHKIRKCIENVYGKDGIRMFNETDIDTFGYALTIFKDDEDIVAYLQNEYITKNGKRVSNLANKVYDKSLIDELLNLSFSKFAHLSMKAIRNILPYMEQGEIYSKACELAGYNFTGPKKKEKALLLPVIPNIANPVVMRALTQSRKVVNAIIKKYGSPVSIHIELARDLSHSFDERKKIQKDQTENRKKNETAIKQLIEYELTKNPTGLDIVKFKLWSEQQGRCMYSLKPIELERLLEPGYVEVDHILPYSRSLDDSYANKVLVLTKENREKGNHTPVEYLGLGSERWKKFEKFVLANKQFSKKKKQNLLRLRYEETEEKEFKERNLNDTRYISKFFANFIKEHLKFADGDGGQKVYTINGKITAHLRSRWDFNKNREESDLHHAVDAVIVACATQGMIKKITEFYKAREQNKESAKKKEPIFPQPWPHFADELKARLSKFPQESIEAFALGNYDRKKLESLRPVFVSRMPKRSVTGAAHQETLRRCVGIDEQSGKIQTAVKTKLSDIKLDKDGHFPMYQKESDPRTYEAIRQRLLEHNNDPKKAFQEPLYKPKKNGEPGPVIRTVKIIDTKNKVVHLDGSKTVAYNSNIVRTDVFEKDGKYYCVPVYTMDIMKGTLPNKAIEANKPYSEWKEMTEEYTFQFSLFPNDLVRIVLPREKTIKTSTNEEIIIKDIFAYYKTIDSATGGLELISHDRNFSLRGVGSKTLKRFEKYQVDVLGNIHKVKGEKRVGLAAPTNQKKGKTVDSLQSVSD

SEQ ID NO: 817 - protein, 1069 aa, Bacillus thuringiensis
MNYDIGLRIGITSCGWSIINKDLERIEDLGVRVFEKAENPDGTASAAPRREARKSRRKHRRKKHRIERIKRLIVQHDLLSKKELDSLYLSPFNIDVWNLRVEALERKLDNREFARVLIHLVQRRGFQTIRKSVEIQEEGKLLENVSENERIMKVNGYKTVGEMFSKHEKFTHHKRNKDGSYTSVVTRSLLLKEIKTIFNSQRILGNVFSTQKLESDYLYIWGSQRPTLTYEQLMSMVGNCIYEKKEKRAPKTSWAFQYFSLLQKINKLKVSDDNTLRKLSKEERDIVIELAFKKKNVSFVDIRKALKLNDNTKFNHLTYSHVVETKKVEKATFIELKGYHLIKKQLKDRNVELTQELQPKDYDAIAAASTFFKNDIEFRDYLRNQYLDSNGKRKSNIANKVFEDKVIAAVFELNFSKVCHLSFKSLYKLIPHLEKGLDYKEAILCAGYNFRDENKRDKKLFLPVIQQETNPVVHRALTQARKVINAIIREYGSPNTIRFVVANDLAKTYKQRKELESTLKKNRAENEKIKTKLLSMGIINPTGMDIVKYKLWYEQSGICLYTGRQMELSSLFKPGYSIVNHIIPYNRSFDDTYHNRVLTLTETKYEKGNKIPFEYFGAEETCWNEYEKRVSTSKKIHDKKREKLLIRNFDIEYENEMISNNVFDTHYIGSYFEKYIDEHLQFKKSTKKQKVFSIHGNMVAHLHSRWGFNKNSREIYLNHAVDAAIVAVLTDQLIRNIADYYRRDNILEQKGSLKFPEPWKSFSIELEARISPQVRDLIKKLNLDSYLDVDILHIKPVFISKKPRRKVNGEAHKSTIRSLIGINEIGKTVTCIKTRLEDIPFDENGDFPMYGKDTDKYTYTAIKERYLEFNKDKEKAFSTPLYKLKRNGEPGNQIKSVKIIDTRNIVNKVNQGKGIAYNSNIIRVDVFSRDQKYYVVPIYLRDFIKGSLPNKIITAAKGFMQWPETDNSYTFLFSIFPNDLIKVVPKEGKFIKAKNENKENINLTEILGYFKGLDSSTGAFTLESHDGSLLARGIGTKNLLLIEKYQVDVLGRYNKVGNEERQDIKIQQN

SEQ ID NO: 818 - protein, 206 aa, Bacteroides cellulosilyticus
MKKILGLDLGCNSIGWALVNEAENTEEISSIIKLGVRVNPLTVDEMQNFEKGKSITTNADRTLKRSMRRNLQRYKLRRDTLIEVLKEHGFITDSTLLSEHGNKTTFETYRLRAKAAVEEISLEKFARVLLMINKKRGYKSSRKAKGSEDGVLIDGMDVARKLYEEGLTPGELCLQILEAGKKNLPDFYRSDLQNEFDRIWNFQKLV

SEQ ID NO: 819 - protein, 349 aa, Bacteroides coprosuis
MKKILGLDIGTNSVGWAVVNTNQEGEPSQIEKLGSRIIPMSQDILDKFGQGQTVSSTASRTDYRGIRRLRERSLLRRERLHRVLHILDFLPKHYADSIGWDPRNSKTYGKFLPGTEVKLAWVPTADGHQFLFYSTYLEMLEDLKQTQAQLFETSQTPVPLDWTIYYLRKKALTQPITKHELAWLLLHFNTKRGYYQRRGELEDTPTDKLVEYHALKVVDVEVDPEDQSKKPWYFVHLENGWIYKRQSSEPLDNWKGLVKEFIVTTHLDKEGKPKLDKEGEVRRSFSSPKEDDWTLVKKKTENDLEKSGLTVGAYIYQTLLNKPNQKIRGGLIKHIERNYYVEELEQILR

SEQ ID NO: 820 - protein, 1504 aa, Bacteroides coprosuis
MKKVLGLDIGTNSVGWAVVNQNDKGEFLSIEKIGSRIIPMSQDVMDKFGAGQTESSTAQRTQYRGVRRLRERSLLRRERLHRVLHILHFLPQHYDAAIGWNKKENKTYGKFLPGVEVNIPWVATDQGHQFIFMDSYAEMLKDLKQHQPHLFEKSSTPVPLDWTIYYLRKKALTQAISKEELAWILLNFNQKRGYYQLRGEEVEDNTKREEFYALKVVKVELDKDNTSAKTWYKVHLENGFIYPCPSDTPIDSWVGMVKDFIVTTTLEKDGSEKRTADGEIKRSFRAPKEDDWTLLKKKTESELEKSGKQVGAFIYDTLLSNPDQKIIGGLIKTIERKYYKKELEQILETQQKFIAELSDKKLFQACAEELYPLNDSHRENLLERDFKHLFVQDIIFYHRPLKTKKSLISNCTYEYRTFYKNGEKQISPIKCIAKSNPLFQEFRVWQFVQNLRILQRQRSEGDSIKYNVDVTAEFLKDENDIANLFTWLNERKVIKQDQLLKSYFKLKVNKETKELDYRWNYVDDKNKEYPCNATRTHILSFLEKCKEEKRIEDDRFVYSLWHLLYSVVEPIELRGALAKFAEREHLHPSFVDVFAQFPPLEKEYGSYSEKAIKRLLPLMRMGDYWHEDKIDVKTKQRIQRIIDGEADDDITHRSREKVENLRSITDFKGLPLWKAGYVVYNRHSESGELTKWKTPHELSNYIQNEFKQYSLRNPIVEQIVLETLRVVHDLWVKHGDFSEIHLELGRDIKNSSDKRKRMAERQQENENSRQRVLEMLIDLKKEAAFADLNPYSPSQQEKLRIVEDGVLRSNIEIPKDIEKITKSAKPTSRELTKYRLWLDQKYRSPYTGQPISLAQLFTSKYEIEHVIPQAKYFDDSFTNKVICESEVNKEKGSMLAHEFILKNGGSTVNVGGRQVQVLKNDAYVELINRLYGKNNPVKAKKLLAEDIDEVVGDFSERQLNDTRYISRVVQKLLSNIVREEDEQESTSKHVIGCSGQVTTALKKDWGLNDIWNKIIQPRFERLNEMTATEDYGVWQSPNHFQIRVPEEIQKGFTKKRIDHRHHAMDALVIACATRSHINYISNRSGQDRNAKFETTRTDLRSKLCYKENSSGNNYNYIFNKPWDTFTQDAHRALENIVVSHKQNLRVLTKTNNYTQFINKDGKKDLQKQVKGDHFAVRKPMHQETIYGRVSIRSIKEVALKKALENWKQIVDRTLKDKIRELIGAYGKYDAQTILKYFKDRDYKFNNLKINRVEVYEYDHNCAAVRKSIGDDLTIKQIERITDESIRKILMNHLSNYDDNLKEAFSPEGLMEMNKNIKELNGGKNHQPIYKVRLFEDLGSKFPLGVSHNNPDKYAIAAKGTNLFFGIYEDQEGKRMFDSIPLNIVIDRLKEKKSPVPETYNESKLKFHLSPNDLVYVPTDEEQKQPELVDVDHLSDEQKGRVYKAVSFTGNRAFFVNHRVSKVIHDYVEFGTKNKIENDDDKRSLKHICWKLKVNRLGEITDVKR

SEQ ID NO: 821 - protein, 1509 aa, Bacteroides eggerthii
MKTILGLDLGTNSVGWAVINSVIKEQAERIWIEMAGSRIIPMDAAVLGDFDKGNSISQTSERTRLRGARRLRERQLLRRERLHKVLNILGFLPNHYLEYIDFEKHPGKFLADAEPKLAWVKDEQGKYTFLFQAAFDEMLADFAIHQPSLVSGDKKIPYDWTIYYLRKKALTEMISKEELAWILLNFNQKRGYYQLRGEEEEDNAGKSVEFYALKVLTVEATDEKKGRDVWYNVHLENGWIYRRSSSVPLDWEGQVKEFIVTTDLNPDGTPKLDKYGEVKRSFRAPKEDDWMLIKKRTEADIANTHKTVGAYIYDTLLQKPQQKIIGKLVKTVERKLYRDELSLILQKQCAFHAELQDRALYARCVEALYPSNEVRRKNIANRDFVYLLMDDILFYQRPLKTKKSLIANCPYEENEYVDRETGEIKKTPLKCIAKSHPLFQEFRLWNFLSNIRIYQKEKEINGTLHLDVDVTAEFLKTEDDYVALFDWLNSRKEIEQKTFLKYPKFGLKKEISNYRWNYVEDKQYPCNETRHAILSSLEKANVCIDFLSNEKEVALWHILYSVSDKQEIEKALRTFAAKNGLDESFVEAFKKFPPFKSEYGAYSAKAIKKMLPLMRCGKYWDVSSIDDTTKERIKKIVTGEYDERISVKVRDKVMNLSDISCFRRLPLWLACYIVYNRHSEDKEAVKWESPADIDAYLASFKQHSLRNPIVEQVITETLRVVRDIWKQVGRIDEIHIELGREMKNPADKRKRMTAQILENENANLRIKALLAEFMNPEYEIENVRPYSPSQQEILRIYEDTVLHAEDQLPEEIDAILKKFNSSKVPTKSEFLRYKLWLEQKYRSPYTGELIPLGKLFTAAYEIEHVIPQSRYFDDSFSNKVICESAVNKLKDNQLGYEFIKNHHGQKVEVGFGKSVEIFSVDSYERFVKEQYAKSAVKMKKLLMDDIPEQFIERQLNDSRYISKVIKGLLSNIVREKNDSGEYEPEAVSKNIVVCTGSVTDRLKRDWGMNDVWNSIVYPRFERLNSLTDTQSFGHWENKSGKKVFQTELPLEYQKGFSKKRIDHRHHAMDAIVIACATRNHVNYLSNESASRNAKISRYDLQRLLCDKNRTDDNGNYKWVIKKPWDTFTQDAREVLSKIVVSLKQNLRIINKTTNVYRHLDATGNRVYEKQKTGDSWAIRKPMHKDTVFGAVNLRKVKVVRLSVALDTPAMIVDKRVKNKVFELLSYKYDKKRIEKYFKENAFLWKELDLAKVAVYYFTEATTEPLVAVRKPLDSTFNEKKIKESVTDTGIQKILLNHLCTKEGKPDLAFSAEGIEEMNRNLLQLNNGKSHQPIYKVRVYEPRGNKFSVGVLGNKGTKWVEAAKGTNLFFAIYITEDGKRTYETIPLNVVIEREKQGLVPVPDRNKKGDKLLFWLSPNDLVYLPTEEEREFGRINEPIDRGRIYKMVSCTGNEGHFIPANVANPIVPVIELGSNNKAQRAWTNEMIKDICIPIKVDRLGHIIEVKYRIDE

SEQ ID NO: 822 - protein, 1526 aa, Bacteroides faecis
MKKILGLDLGTNSIGWAVLNAADDNSLKYIEAAGSRIIPMDAAILGDFDRGNSISQTAERTRIRGMRHLRERYLLRRARLHRILNLLGFLPFHYAQDIDRYGNFSADMEPKIAWCKNLEGELEFIFIESFNEMLEDFRKNQPELVADNKKVPYDWVIYYLRKKALEKKISKEELAWILLNFNQKRGYYQLRGEDDDESMKTAKTRQYFDKQIIKNIIDTNQTYKGQRILIVELQNGDKGKIFKKEIPDWIGQEKNIIVTVDIDKDGNDKYEESGSLSCRFKIPTDAEWESEWKLIKMKTQKDLDESNKTVGTYIYDSILQNPTQKVRGKLVRTIERKYYKAELKQILEKQTEFHSELQDKDLYIECLNELYSNNDTHRNAITDRDFVYLFMNDILFYQRPLKSKKSLIDNCPYERNIYIDKETGEIKYSPIKCIAKSHPLFQEFRLWKFISSIRIYQRESVVEVVDKQLDLFSSQSTSVQKLVTDVDVTDKFLTCENDYVALFEWLNKKKIIDQKEFLKYRPFGLKGDIDNYRWNYVEDKSYPCNETHAMILTYFAKAGISEDILTKEMEEALWHILYSVEDRQEITKALRTFASKYHLSDSFVKVFSNIPPFKKEYGSYSAKAIKKLLSLMRMGKYWSEDAIDVNTRERIDKIVTGEYDEKIRDRVREKTIRLNDIRHFRALPDWLACYVVYDRHSETREITEWKSPEEIDEYIRNFKQHSLRNPIVEQVITETLRTVRDIWKQVGCIDEIHVELGREMKNPADKRKRITSQIIENENANLRVKALLTEFVNSEFEIENVRPYSLSQQDILRIYEDGVLNSVAEVPGDIAGILKKFNENDAKKRPTTSEILRYKLWLEQKYRSPYTGEMIPLSKLFTSAYEIEHVIPQSRYFDDSFSNKVICEAEVNKLKDNALGYEFIKKHHGEKVELGFGKIVEIFSVSVYEQFVKDNYSRNRGKMKKLLMDEIPEQFIERQLNDSRYISKVVKTLLSNVVREKAEQEAVSKNVIVCTGGVTDRLKKDWGINDVWNKIVLPRFLRLNELTNSTNFTAKNAAGNEIPAMPLELQKGFNKKRIDHRHHAMDAIVIACANRNIVNYLNNESASRKAKISRHDLQAILCDKVRTDDKGNYQWRVKKPWDTFTQDVYVALENIIVSFKQNLRVINKTSNYYWHYENGKKVLVKQVKGDSWAIRKPMHKDTVFGEVNLRKVKSVSLNEALKNPQFIVEKDLKRQLLSLLQQNFDIKKIKKYFEEHKDIWSDISLSKMNIYYFTKETKDRYFATRKPLDASFDKKKIESCITDTGIQQILLRHLELKENDPERAFSPDGIDEMNRNIIQLNKGKGHHPIAKVRVYEKADKFEVGQRGNKSSKFVEAAKGTNLFFAVYETEYPDEKTNSIVRKRNYATIPLNIAIERQKRGLSTAPEDEKGNVPSFVLSPNDLVYLPTSEDIVNGHITQPIDKSRIYKMVSSSGSQCFFIKHNIANIIVDKYEFSPLNKMERAISNEMIKEICIPVKVDRLGNIVKLGKSE

SEQ ID NO: 823 - protein, 1509 aa, Bacteroides fluxus
MKTILGLDLGTNSVGWAVINSVIKEQAERIWIEMAGSRIIPMDAAVLGDFDKGNSISQTSERTRLRGVRRLRERQLLRRERLHKVLNILGFLPNHYLEYIDFEKHPGKFLSDAEPKLPWVKDEQGKYTFLFQAAFDEMLADFAIHQPSLVSGDKKIPYDWTIYYLRKKALTEMISKEELAWILLNFNQKRGYYQLRGEEEEDNAGKSVEFYALKVLTVEATDEKKGRDVWYNVHLENGWIYRRSSSVPLDWEGQIKEFIVTTDLNPDSTPKLDKYGEVKRSFRAPKEDDWMLIKKRTEADIANTHKTVGAYIYDTLLQKPQQKIIGKLVKTVERKLYRDELSLILQKQCAFHAELQDRTLYARCVEALYPNNEVQRRNIANRDFVYLLMDDVLFYQRPLKTKKSLIANCPYEENEYVDRETGEIKKAPLKCIAKSHPLFQEFRLWNFLSNIRIYQKEKEINGTLHLDVDVTAEFLKTEDDYVALFDWLNSRKEIEQKTFLKYPKFGLKKEISNYRWNYVEDKQYPCNETRHAILSRLEKANVCIDFLSNEKEVALWHILYSVSDKQEIEKALRTFAAKNGLDESFVEAFKKFPPFKSEYGAYSAKAIKKLLPLMRCGKYWDVSSIDDTTKERIKKIVAGEYDERIAVKVRDKVMNLSDISCFKRLPLWLACYIVYNRHSEDKEAVKWESPADIDAYLASFKQHSLRNPIVEQVITETLRVVRDIWKQVGRIDEIHIELGREMKNPADKRKRMTAQILENENANLRIKALLAEFMNPEYEIENVRPYSPSQQEILRIYEDMVLHAEDQLPEEIDAILKKFNSSKVPTKSEFLRYKLWLEQKYRSPYTGELIPLGKLFTAAYEIEHVIPQSRYFDDSFSNKVICESAVNKLKDNQLGYEFIKNHHGQKVEVGFGKSVEIFSVDSYERFVKEQYAKSAVKMKKMLMDDIPEQFIERQLNDSRYISKVIKGLLSNIVREKNDSGEYEPEAVSKNIVVCTGSVTDRLKRDWGMNDVWNSIVYPRFERLNSLTDTQSFGHWENKSGKKVFQTELPLEYQKGFSKKRIDHRHHAMDAIVIACATRNHVNYLSNESASRNAKISRYDLQRLLCDKSRTDDNGNYKWVIKKPWDTFTQDAREVLSKIVVSLKQNLRIINKTTNVYRHLDATGNRVYEKQKTGDSWAIRKPMHKDTVFGAVNLRKVKVVRLSVALDAPTMIVDKRVKNKVFELLSYKYDKKRIEKYFKENAVLWKELDLARVAVYYFTEATTEPLVAVRKPLDSTFNEKKIKESVTDTGIQKILLNHLCTKEGKPDLAFSAEGIEEMNRNLLQLNNGKRHQPIYKVRVYEPRGNKFSVGVLGNKGTKWVEAAKGTNLFFAIYITEDGKRTYETIPLNMVIEREKQGLAPVPDKNEKGDKLLFWLSPNDLVYLPTEEELEFGRINEPIDRGRIYKMVSSSGNQCFFIPQSISNAIIPTKELGANNKAERSWDGAMIKNICIPVKVDRLGRIIEVKYRINE

SEQ ID NO: 824 - protein, 1436 aa, Bacteroides fragilis; identical to SEQ ID NO: 155

SEQ ID NO: 825 - protein, 1512 aa, Bacteroides nordii
MKNILGLDLGTNSIGWAVINSEEDGPIVKKRIELAGSRIIPMDAAVLGNFDSGVTKSQTAERTSFRSIRRLRERQLLRRERLHKVLQILGFLPEHYVNDIDFENHPGKIKRNTEPKLPWRKNSMGQFEFIFQDSFEAMLTDFATHQPVFVSEGKKVPYDWTLYYLRKKALTEGISKEELAWLILNFNQKRGYYQLRGEEEEEQSNKLVEFYALRVVKVEATDDKKGKDTWYNVHLENGWIYRRTSNIPLDWEGKVKEFIVTTDLNEDGTPKLDKYGEVKRSFRAPKEDDWTLIKKKTESDIANSHKTVGCYIYDALLQNPHQKIKGRLVRTVERKFYKEELRLILEKQLSFHPELQDRDLYRACIDALYVSNEAHKNNISGRDFVYLFIDDIIFYQRPLKTKKSLIDNCPYEENQYMDRETGEVKQAPIKCIAKSHPLFQEFRLWQFISNIRIYQRERVLDDGKLETDVDVTPDFLKTEDDYTTLFEWFNDRKEVDQKAFLKNPQFGLKKTFTEYRWNYVEDKSYPCNETRNAILNGLQKAGVSADFLSREVEEALWHILYSVEDKIEIESALRKFASKHDLDDRFADVFKKLPPFKKEYGAYSAKAIKKLLPLMRIGKYWELSNIDDKTKERIDKIITGEWDENIHDRVREKAIKLSDITDFKGLPLWLSCYVVYNRHSEARAIAKWESPEDIDSYLRLFRQHSLRNPIVEQVITETLRTVRDIWKRVGQIDEIHVELGREIKNPADKRAKMTAQIVENENTNLRIKALLAEFINSEYEIENVRPYSSNQQEKLKIYEDTVLNGVKEIPEDINTILKKFRESDLKKRPTKSDFLHYKLWLEQKYCSPYTGRIIPLGKLFTSAYEIEHIIPQAHYFDDSFSNKVICEAEVNGLKDKKLGYEFIKHNPGKMVEIGFGKPPVRIFSVEEYERFVKENYSGIKNKMNKLLMDDIPETFIERQLNDSRYISKVVKSLLSNIVREKDSNGEYEPEAISKNVIVCTGSVTDRLKRDWGVNDVWNSIIYPRFERLNELTGSQQFGCWENKEGKRVFQTAVPLEMQKGFSKKRIDHRHHAMDAIVIACATRNHINYLSNESASKKAKISRTDLQRLLCTKCRTDDNGNYKWIVKKPWPAFTQDIRKALENITVSFKQNLRVINKTTNYYVHFDESGKKVLEKQINGDSWAIRKPMHKDTVFGKVNLQKVKEVRLSLALDTPKMIVDKKLKEKVLQLYSYKYDKKRIDKYFKENASLWKDLNLSKVAVYYFTNDSTEPLVAVRKPLDTSFNAKKIKESVTDTGIQKILLNHLSNNQDDPNLAFSPDGIDKMNKNLTALNDGKYHQPIYKVRVCEPQGNKFSVGTSGNKTSKYVEAAKGTNLFFAVYQTEDGKRSYETIPLNVVIEREKLGWTPVPENNNNGDKLLFWLSPNDLVYVPTADELNNGMRLDNMDKGRIYKMISCSGPQCFFIPQNVSNAIIPVIELGANNKAEKSWNNEMIKVVCVPIRVDRLGCITQINNQK

SEQ ID NO: 826 - protein, 779 aa, Bacteroides oleiciplenus
MKEGNQYDVACEYAGYRHSKSSLTREEIDNKVLKNRLEILPKNSLRNPVVEKILNQMVNVVNAVIDTYGKPDEIRVELARELKKGAKEREELAKSIAQNTREHEAIRQLLQTEFGMMHVTRNDIIRYKLYEELKDNGYKTLYSDQYIPREKVFSKEIDIEHIIPQARLFDDSLSNKTLEYRAVNIEKGNKTAYDFVKEKYGNDGLRRYLNHCEALFKDKKTKLKKLKMEDQDIPDGFIDRDLRNTQYIAKKALSMLSEISRRVVATTGSITDELRKDWQLVDIMKELNLPKYEALGFVETFKDKDGRIIKKIKDWSKRNDHRHHAMDALTVAFTKDVFIQYFNNKNAFWMSGSKEHANITAIKNKYFEKGKALAPIPLELFRTEAKHHLENILVSIKAKNKVVTNNINRTKKKNGENLKLQQTPRGQLHLESIYGSYRQCIIRDEKVNASFDASKIANVSKSAYRNALLKRLEAYDNDPKKAFTGKNSLDKNPVYLDENKMEKVPDRVKIVEFETVYTIRKPIDPKLSIDKVVDARIRTLLKKRLEEYGGDAQRAFSNIEENPIWLNKEKGISVKRVAIRGISNAQALHDKKDKDGNPILDKEGKGIPTDFVNTSNNHHVAIYRKPVVDKMGQVILDENGSPRYELGEDVISFFEAVARVNLRQPVVDKDYKRSEGWQFLFSMKQNEYFVFPNEKTGFNPKEIDLLNPENYALISPNLFRVQKIGLNDYTFRHHLETSIQNNSNELKFITWIRCGKNGINGVIKVRVNHIGQIVSMGEY

SEQ ID NO: 827 - protein, 653 aa, Bacteroides oleiciplenus
MKKILGLDLGSSSIGWALVNEGANDEEKSSIIKLGVRVNPLTVDEAQNFEKGKSITTNADRTLKRGMRRNLQRYKQRREALVEVLKKHEFITAGTLMSEQGNKTTFETYRLRAKAVEEEISLEEFARVLLMINKKRGYKSSRKAKGDEDGVLIDGMDVAKKLYDEDLNPGELCLQLLEAGKKTLPDFYRSDLQDEFDKIWNFQKQFNPESFCDTAKEEVRGKNRTQTWTILSKYFVWTEGDSVWNNEEARTEERIKEYKLVGIKRTTKGYEQKLENYRWRVQALSEQLNPEIIAIVLQEINGQISASSGYLGAISDRSKELFFNHQTVGQSLMSELDKNPNGSLRNKVFYRQDYLDEFNTIWEKQSLYHKELTVELKKEIRDIIIFYQRRLKSQKGLISTCEFEQREIIVEKDGKRKTKIIGCKVIPRSHPLFQEFKIWQTLNDVEVYVADRRTKRKQDRKSTTLFSDTEDILLVEGKRYLYQEEKELLAKELFVRENMKKAEVLKLLFEDPKELDLNFKQIDGNRTGFALFSAYSKMIEKYGYESVNFKNSADEIIEKLQIIFADLGWNTELFSIDLSKDDKELEKQPYFRLWHLLYSFEGDNTPTGNGKLIEALMRLCSVEKEYASVLANVSFQEDYGSLSAKAIKKYYLI

SEQ ID NO: 828 - protein, 1436 aa, Bacteroides sp.
MKRILGLDLGTNSIGWALVDEAENKDERSSIVKLGVRVNPLTVDELTNFEKGKSITTNADRTLKRGMRRNLQRYKLRRETLMEVLKEHKLITEDTILSENGNRTTFETYRLRAKAATEKISLEEFARVLLMINKKRGYKSCRKAKGAEEGTLIDGMDIARELYNNNLTPGELCLQLLDAGKKYLPDFYRSDLQNELDRIWEKQKEYYPEILTEVLKEELRGKKRDAVWAICAKSFVWEEYYTEWNKEKGKTEQQEREHKLEGIYSKRKRDEAKRENLQWRVNGLKEKLSLEQLVIVLQEMNIQINNSSGYLGAISDRSKELYFNKQTVGQYQMEMLDKNPNASLRNMVFYRQDYLDEFNTLWEKQAEYHKELTGELKKEIRDIVIFYQRRLKSQKGLVGFCEFESRQIEVEIDGKKKIKTVGNRVIPRSSPLFQEFKIWQILNNIEVTVVGKKGKRRKQKDNSPTLFDGLDDTEQLELNGSRYLYQEEKELLAQELFVRDKMTKSDVLKLLFDNPQELDLNFKTIDGNKTGYTLFQAYSKMIEMSGHEPVDFKKTVEKVVEHVKAVFDLLNWNTDILGFNSNEELDNQSYYKLWHLLYSFEGDNTPTGNARLVQKITELYGFEKEYAIILANVTFQDDYGSLSAKAIHKILPHLKEGNRYDVACAYAGYKHSESSLTKEEIANKALKDRLTLLPKNNLRNPVVEKILNQMVNVINAIIDTYGKPDEIRVELARELKKNAKEREELTKFIAETTRKHEEFKILLQSEFGLTNVSRTDILRYKLYKELESCGYKTLYSNTYIPREKLFSKEFDIEHIIPQARLFDDSFSNKTLEARSINLEKGNKTAYDFVKEKFGESGADNSLDHYLNNIEDLFKSGKISKTKYNKLKMAEQDIPDGFINRDLRNTQYIAKKALSMLNEISRRVVATSGTITDKLRQDWQLVDVMKELNWEKYKALGLVEYFEDKDGRQIGRIKDWTKRNDHRHHAMDALTVAFTKDIFIQYFNNKNASLNSNTNEYAIKNKYFQNGRAIAPIPLREFRVEAKKHLENTLISIKAKNKVVTGNINKTKKRGGVNKYLQQTPRGQLHLETIYGSGKQYLTKEEKVNASFDMKKIATVSKSAYRDVLLKRLHENDNDPKKAFTGKNSLDKQPIWLDKEQTRKVPEKVKTVTLETIYTVRKEISPDLKVDKVIDAGVRKILTGRLNEYGNDAKKAFSNLDENPIWLNKEKGISIKRVTISGISNAQSLHVKKDKDGKPILDEDSRNIPVDFVNTGNNHHVAVYRRPVIDKRGQLVIDEAGNPKYELEEVVVSFFEAVTRANLGQPIIDKDYKTSEGWQFLFSMKQNEYFVFPNEKTGFNPKEIDLLDAENYGVISPNLFRVQKFAHKNYVFRHHLETTIKDTSSILKGITWIDFRSSKGLDAIVKVRVNHIGQIVSVGEY

SEQ ID NO: 829 - protein, 1510 aa, Bacteroides sp.
MKRILGLDLGTNSIGWALVDSEEQRILGMGSRIIPMDQGVLDTFSGGNPVETQTAARTAYRGTRRLRERALLRRERLIRVLNMMKFLPEHYASQIDFEKRLGQFFDEKEPKLAWKQNDEGRFEFIFQQSFNEMIEEFKNKGVVREDKKIPYDWTIYYLRKKALSQEIEKEELAWILLNFNQKRGYYQLRGEEEEENPNKLVEYYSLKIVDVIADEKPNSKGDIWYSLHLENGWIYRRSSKIPLFGWKDKTRDFIVTTDLNDDGTVKKDKEGIEKRSFRAPSENDWVLLKKKTESDIEKSHKTVGAYVYETLLQNPMQKVRGKLVRTIERKFYKDELKQILEKQREFHPELRDEDLYNDCVRELYRSNETYQFILSKRDFVHLFLDDILFYQRPLRSQKSAIGDCILEFKTYKDKDGNNIKEYLKVISKSNPLYQEFRIWQWLYNLKIYRKEDDEDVTLQFIANIEDKEQLFDFLSNRKSIEQKPLLEYLIKAKGLKKQVKTEAYRWNYVEDKIYPCSETKTMISTRLAKVENIPDNFFTKEIEQKLWHIIYSVTDKNEFEKALRTFAKKYDLDIASFVDNFKKIPPFKNEYGSFSEKAIKKLLPLMRLGKYWKWNDIDNNTQNRISKIITGEYDEEIKDIVREKSIALTNENDFQGLQLWLAQYLVYGRHSEADIAGKWHSVADLEKYLNEFKQHSLRNPIVEQIITETLRVVRDIWRKYGQGAENFFSEIHVELGRDMKNTADERKKIVNVVTENENTNLRIKALLMELKNNSDGKLEVENVRPYSPTQQDILKIYEEYAISTGLDNEKDEKVKEDIKKISRVAQPTTTELQRYKLWLEQKYCSPYTGKVIPLGKLFTEEYQIEHIIPKSRYYDDSFSNKVICEAAVNKLKDKCLGLEFIKNYHGQIVETGFGQKVTIFDEEAYQNFVKQHYAYNRSKRTKLLLEEIPEKMIERQMNDTRYISKFVLPLLSNLVRAEENDNGVNSKNVLPVNGKITTMLKQDWGLNDVWNDLILPRFVRMNELAKTIAFTSWNEQHQKYLPTVPLELSKGFQKKRIDHRHHAMDALVIACATRDHVNLLNNKHANTDTIRYDLQRKLRLFERVTYIDPQTKNNVTKDIPKEFKKPWDNFTVDARNELEKIIVSFKQNLRIINKATNIYTKYENGKKIKVGQKGLNWAIRKPLHKETVFAKVSLRKRKTVRLSEALKDWKKIVDKKLKQEIKRLTCQYGKFDVDTILRYFKDRKYQFGEVDVSKVKMYYFDEENAAVRKNVDTSFTEKFIQGSVTDTGIQKILLNHLEAKGNKVEIAFSPEGIEEMNKNIIQLNEGKLHLPIFKVRVYETIGNKFSVGVKGNKKDKYVEAAKGTNLFFAIYVDENGIRSYETIPLNIVIERLKQGLSVVPEKNRKEHSLLFYLSPNDLVYVPIEDERENIHAVNLDQLNNEQRKRIYKMVSCTGSECHFVPYYVASPIVNKVEYSSLNKIGRSLTGEMIKDVCIKLKVDRLGNVKGISGL

SEQ ID NO: 830 - protein, 1436 aa, Bacteroides sp.
MKRILGLDLGTNSIGWALVNEAENKDERSSIVKLGVRVNPLTVDELTNFEKGKSITTNADRTLKRGMRRNLQRYKLRRETLTEVLKEHKLITEDTILSENGNRTTFETYRLRAKAVTEEISLEEFARVLLMINKKRGYKSSRKAKGVEEGTLIDGMDIARELYNNNLTPGELCLQLLDAGKKFLPDFYRSDLQNELDRIWEKQKEYYPEILTDVLKEELRGKKRDAVWAICAKYFVWKETYTEWNKEKGKTEQQEREHKLEGIYSKRKRDEAKRENLQWRVNGLKEKLSLEQLVIVFQEMNTQINNSSGYLGAISDRSKELYFNKQTVGQYQMEMLDKNPNASLRNMVFYRQDYLDEFNMLWEKQAVYHKELTEELKKEIRDIIIFYQRRLKSQKGLIGFCEFESRQIEVDIDGKKKIKTVGNRVISRSSPLFQEFKIWQILNNIEVTVVGKKRKRRKLKENYSAIFEELNDAEQLELNGSRRLCQEEKELLAQELFVRDKMTKSEVLKLLFDNPQELDLNFKTIDGNKTGYALFQAYSKMIEMSGHEPVDFKKPVEKVVEYIKAVFDLLNWNTDILGFNSNEELDNQSYYKLWHLLYSFEGDNTPTGNGRLIQKMTELYGFEKEYATILANVSFQDDYGSLSAKAIHKILPHLKEGNRYDVACVYAGYRHSESSLTREEIANKVLKDRLMLLPKNSLHNPVVEKILNQMVNVINVIIDIYGKPDEIRVELARELKKNAKEREELTKSIAQTTKANEEYKTLLQTEFGLTNVSRTDILRYKLYKELESCGYKTLYSNTYISREKLFSKEFDIEHIIPQARLFDDSFSNKTLEARSVNIEKGNKTAYDFVKEKFGESGADNSLEHYLNNIEDLFKSGKISKTKYNKLKMAEQDIPDGFIERDLRNTQYIAKKALSMLNEISHRVVATSGSVTDKLREDWQLIDVMKELNWEKYKALGLVEYFEDRDGRQIGRIKDWTKRNDHRHHAMDALTVAFTKDVFIQYFNNKNASLDPNANEHAIKNKYFQNGRAIAPMPLREFRAEAKKHLENTLISIKAKNKVITGNINKTRKKGGVNKNMQQTPRGQLHLETIYGSGKQYLTKEEKVNASFDMRKIETVSKSAYRDALLKRLYENDNDPKKAFAGKNSLDKQPIWLDKEQMRKVPEKVKIVTLEAIYTIRKEISPDLKVDKVIDVGVRKILIDRLNEYGNDAKKAFSNLDKNPIWLNKEKGISIKRVTISGISNAQSLHVKKDKDGKPILDENGRNIPVDFVNTGNNHHVAVYYRPVIDKRGQLVVDEAGNPKYELEEVVVSFFEAVTRANLGLPIIDKDYKTTEGWQFLFSMKQNEYFVFPNEKIGFNPKEIDLLDVENYGLISPNLFRVQKFSLKNYVFRHHLETTIKDTSSILRGITWIDFRSSKGLDTIVKVRVNHIGQIVSVGEY

SEQ ID NO: 831 - protein, 1424 aa, Bacteroides sp.
MKRILGLDLGTNSIGWALVNEAETDEEVSSIIRLGVRVNPLTVDETQNFEKGKSITTNAERTLKRSMRRNLQRYKLRRDALVEFLKELGFITDETILSEQGNRTTFETCRLRAKAAEEEISLEELSRVLLMINKKRGYKSSRKVKKEEDGVLIDGMEIAKKLYEEDLTPGQLCSQLLESGKKVLPDFYHSDLQEELDRIWSVQKQFHPDVFCDAAKEEIKGKNRSQTWAILANYFVWKEEVVGWNDREAKNETIEKECKLVGLKRTTKGYELKKENYRWRAQALTEQLGLEEIAVVLQEINGQINASSGYLGAISDRSKVLYFNHQTVGQYQMAELDKNPHASLRNMVFYRQDYLDEFDRIWEKQAEFHKELTAELKKEIRDMIIFYQRRLKSQKGLISFCEFERLEIVVEKDGKKQTKVIGCKVIPRSHPLFQEFKVWQTLNDIKVLGREKKRNALSASESRALYPEEKEILARELAIKENMKKADVLKLLFENPQELDLNFKQIDGNRTGFSLFSAYSKMIEKYGYEPLDFKKPADEIIGQLRTIFTDLGWNTNLFTIDLTKEGKELEMQPYFRLWHLLYSFEGDNTSTGNGKLIEKIMQLCGVEKEYAVELASLSFQDDYGSLSAKAIKRILPYLKEGNLYDVACEYAGYRHSKSSLTKEEIENKVLKGKLEVLPKNSLRNPVVEKILSQMVNVINTIIDTYGKPDEIRVELARELKKSAKEREELTKAIAKSTREHEEIRKLLQDEFGMMNVSRNDIIRYKLYEELKDNGYKTLYSNQYIPKEKIFSKEIDIEHIIPQSRLFDDSLSNKTLEYKAINIEKGNKTAYDFVKEKYGEEGLQQYINRCESLFNDKKAKLRKLKMEQKDIPDGFIDRDLRNTQYIAKKALAMLNEICRRVVATTGSITDQLREDWQLVDVMKELNLPKYEALGFVETYEDKDGRKIKRIKDWTKRNDHRHHAMDALTVAFTKDAFIQYFNNKNAAQDSGNRNHTNIIGIKTRYFDKGRALPPIPLEQFRIEAKQHLEKLLVSIKAKNKVVTVNVNRTKKRKGENTKIQQTPRGQLHLETVYGSHKQYVTKIEKVNASFDAAKIATVSKRAYRNALLKRLETFGNDPKKAFTGKNALEKNPLYADKYQTIRVPEKVQTVEFETIYTIRKPVDPALNVDKVVDVKVRAILERRLKEYGGDPKKAFVNFWENPIWLNKEKGISIKRVSIRGINNAQSIHVKKDKNGNPIWDENGKQIPVDFVNTGNNHHVAIYRKPVLDKKGQVTFDEDGNLMYELDEVVVPFFEAVTRANLGLPIIDKDYRKSEGWQFLFSMKQNEYFVFPNEKTGFNPKEVDLLNPDNYAMISPNLFRVQTMSKVMYGNNVVRDYKFRHHLETTVKDMKELKDIAYKQYKTLSFGNSVVKIRINHIGQIVSVGEY

SEQ ID NO: 832 - protein, 1055 aa, Bacteroides sp.
MRIYRKDLAQDVDVTNELLKTEEDYVALFDWLNGKKEIDQKAFLKYPLFGLKKEVENYRWNYVQDKPYPCNETRSSMLARLEKCDISIEFLTKENEEALWHILYSVEDKNEIVKALQKFADKHDLNASFVDVFQKFPPFKKEYGSYSAKAIKKLLPLMRMGKYWSENSIDKGTRERMDKIITGEYDEKIENRVREKAIHLADVSDFKGLPLWLVCYIVYGRHSEAKEITQWKSPADIDLYLRSFKQHSLRNPIVEQIIIETLRVVRDIWKQVGNIDEIHVELGREMKNPADKRKKMTQQMSENENTNLRIKYLLTEFLNPEYEVENVRPYSPSQQDILRIYEEGVLNSVSDLPEEISDILKKFTETDLKKRPSRSEVLRYKLWLEQKYRSPYTGEVIPLGKLFTPAYEIEHVIPQSCYFDDSFSNKVICEAEVNKLKSNLLGHEFIVKHHGEIVELPFGKKVRIFTVDEYEQFVKDNYSRTRSKMKKLLMDDIPEEFVARQLNDSRYISKVVKSLLSNIVREKGEEEAISKNVIPCTGGVTDRLKKDWGINEVWNKIILPRFQRLNELTGTNKFTTKNVGIQEIPTMPLELQKGFNKKRIDHRHHAMDAIIIACANRNIINYLNNESATAKAELSRYDLQKMLCDKAKTDNNGNYKWVIRKPWASFTQDTYLALENIIVSFKQNLRVINKATNHFLHYNEEGKKIFVKQGKGDNWAIRKSMHKDTVFGEVNLRRIKTVALNEAMKNPQSIVVKDFKRKLLELWNLGFDAKRIKKYFEDNRETWSDINLSKIEVYYFSKDTKDRFFATRKPLDTSFDRKKIENNITDTGIQKILLRHLELKDNNPDIAFSPDGIDEMNRNIIQLNNGKYHQPIIKVRWYEQADKFAVGQTGNKSSKFVEAAKGTNLFFAVYESNILDKKTNTIIKKRNYATIPLNVAIERQKQGLPVAPEDENGNDPIFVLSPNDLVYLPTAADLANGIIAQPLDRGRIYKMVSCTGNEGYFIPARIANPILQTIELGSNNKAQKAWTDEMIKEICMPIKVDRLGNVLESSSSYKK

SEQ ID NO: 833 - protein, 1055 aa, Bacteroides sp.
MRIYRKDLAQDVDVTNELLKTEEDYVALFDWLNGKKEIDQKAFLKYPVFGLKKEIENYRWNYVQDKPYPCNETRSLMLARLEKCDISIEFLTKENEEALWHILYSVEDKNEIVKALQKFADKHDLNASFVDVFQKFPPFKKEYGSYSAKAIKKLLPLMRMGKYWSENSIDKGTRERIDKIITGEYDEKIENRVREKAIHLADVSDFKGLPLWLVCYIVYGRHSEAKEIIQWKSPADIDSYLRSFKQHSLRNPIVEQIIIETLRVVRDIWKQVGNIDEIHVELGREMKNPADKRKKMTQQMSENENTNLRIKYLLTEFLNPEYEVENVRPYSPSQQDILRIYEEGVLNSVSDLPEEISDILKKFTETDLKKRPSRSEVLRYKLWLEQKYRSPYTGEVIPLGKLFTPAYEIEHVIPQSCYFDDSFSNKVICEAEVNKLKSNLLGHEFIVKHHGEIVELPFGKKVRIFTVDEYEQFVKDNYSRTRSKMKKLLMDDIPEEFVTRQLNDSRYISKVVKSLLSNIVREKGEEEAISKNVIPCTGGVTDRLKKDWGINEVWNKIILPRFQRLNELTGTNKFTTKNVGIQEIPTMPLELQKGFNKKRIDHRHHAMDAIIIACANRNIINYLNNESATAKAELSRYDLQKMLCDKAKTDNNGNYKWVIRKPWASFTQDTYLALENIIVSFKQNLRVINKATNRFLHYNEEGKKIFVKQGKGDNWAIRKSMHKDTVFGEVNLRRIKTVALNEAMKNPQSIVVKDFKRKLLELWNLGFDAKRIKKYFEDNRETWSDINLSKIEVYYFSKDTKDRFFATRKPLDTSFDRKKIENNITDTGIQKILLRHLELKDNNPDIAFSPDGIDEMNRNIIQLNNGKYHQPIIKIRWYEQADKFAVGQTGNKSSKFVEAAKGTNLFFAVYESNILDKKTNTIIKKRNYATIPLNVAIERQKQGLPVAPEDENGNDPIFVLSPNDLVYLPTDDELANGIIAQPLDRGRIYKMVSSSGEQCFFIKHIVANVLVDKFEFSPLNKMERALTGEMIKMICIPIKVDRLGNVLESSSSYKK

SEQ ID NO: 834 - protein, 286 aa, Bacteroides uniformis
MLSYKYDKKKIEKYFKENAFLWKELDIAKVAVYYFTENTTEPLVAVRKSLDSTFNEKKIASVTDTGIQKILLNHLKSKEGKAELAFSAEGIEEMNRNLLQLNDGKGHQPIYKVRVYEPRGNKFKVGVLGNKGAKWVEAAKGTNLFFAIYITEDGNRTYETIPLNWVIEREKQGLVPVPDRNEKGDKLLFWLSPNDLVYLPTEEERDFGRINEPIDRGRIYKMVSSSGNQCFFIPQSISNAIISTKELGSNNKAEKSWDGEMIKNICIPVKVDRLGRIIEVKYRVNE

SEQ ID NO: 835 - protein, 1508 aa, Bacteroides uniformis
MRTILGLDLGTNSIGWAVINSVIKEQTERIWIEMAGSRIIPMDAAILGDFDKGNSISQTAERTRFRGVRRLRERQLLRRERLHKVLKILGFLPEHYLKGIDFEKHTGKFLSGSEPKLPWVKDRWGKYSFLFQTAFNEMLADFAKHQPSLVFDGKKIPYDWTVYYLRKKALTEMISKEELAWILLNFNQKRGYYQLRGEEEEDNAGKSVEFYALKVLSVEATDEKKGRDIWYNVHLENGWVYRRSSNVPLDWEGRVKEFIVTTDLNPDGTPKLDKYGEVKRSFRAPKEDDWMLIKKRTEADITGTHKTIGSYIYDALLQEPQQKIIGKLVKTVERKFYKEELNFILQKQCAFHAELQDRDLYMRCIEALYPGNEVQRRNIANRDFIYLLIDDVLFYQRPLKTKKSLIANCPYEENEYVNRKTGEIKTAPLKCIAKSHPLFQEFRLWYFLSNIRVYQKEREVNGTLHLDVDVTTEFLKTEDDYVALFDWLNSRKEIDQKAFLRYPAFGLKKEINNYRWNYVEDKFYPCNETRHAILSRLEKAGIGIDFLSDEKETALWHILYSVSDKQEIEKALATFAVKNGLNESFVEVFKKFPPFKSEYGAYSAKAIKKLLPLMRCGKYWDMSLIDGTTKERIERIIAGECDESIGAKVREKAMNLSDISCFKRLPLWLACYVVYNRHSEDKEITKWETPADIDAYLAAFKQHSLRNPIVEQVITETLRVVRDIWKQVGKIDEIRIELGREMKNPADKRKRMTTQILENENANLRIKALLAEFVNPEYGVENVRPYSPSQQEILRIYEDAVLKGEEQIPEDIDVILKKFNTSKLPTKSEFLRYKLWLEQKYRSPYTGELIPLAKLFTAAYEIEHVIPQSRYFDDSFSNKVICESAVNKLKDNQLGYEFIKNHHGQKVEVGFGKTVEIFSVDSYERFVKEQYAKSGIKMKKLLMDDIPEQFIERQLNDSRYISKVVKGLLSNIVREKNDSGEYEPEAVSKNILVCTGSVTDRLKKDWGMNDVWNSIVSPRFERLNALTETQCFGHWENKDGKKVFQTAVPLEYQKGFSKKRIDHRHHAMDAIVIACATRNHVNYLNNESASRNAKISRYDLQRLLCDKSRGDGNGNYRWIIKKPWTTFTQDAREALSGIIVSLKQNLRIINKTTNIYQHFDANGTRVYEKQKIGDSWAIRKPMHKDTVFGAVNLRKVKVVRLSVALDTPSMIVNKRVKNKVLELLSYKYDKKKIEKYFKENAFLWKELDIAKVAVYYFTENTTEPLVAVRKSLDSTFNEKKIASVTDTGIQKILLNHLKSKEGKAELAFSAEGIEEMNRNLLQLNDGKGHQPIYKVRVYEPRGNKFKVGVLGNKGAKWVEAAKGTNLFFAIYITEDGNRTYETIPLNWVIEREKQGLVPVPDRNEKGDKLLFWLSPNDLVYLPTEEERDFGRINEPIDRGRIYKMVSSSGNQCFFIPQSISNAIISTKELGSNNKAEKSWDGEMIKNICIPVKVDRLGRIIEVKYRVNE

SEQ ID NO: 836 - protein, 1210 aa, Bacteroides uniformis
MRTILGLDLGTNSIGWAVINSVIKEQTERIWIEMAGSRIIPMDAAILGDFDKGNSISQTAERTRFRGVRRLRERQLLRRERLHKVLKILGFLPEHYLKGIDFEKHTGKFLSGSEPKLPWVKDRWGKYSFLFQTAFNEMLADFAKHQPSLVFDGKKIPYDWTVYYLRKKALTEMISKEELAWILLNFNQKRGYYQLRGEEEEDNAGKSVEFYALKVLSVEATDEKKGRDIWYNVHLENGWVYRRSSNVPLDWEGRVKEFIVTTDLNPDGTPKLDKYGEVKRSFRAPKEDDWMLIKKRTEADITGTHKTIGSYIYDALLQEPQQKIIGKLVKTVERKFYKEELNFILQKQCAFHAELQDRDLYMRCIEALYPGNEVQRRNIANRDFIYLLIDDVLFYQRPLKTKKSLIANCPYEENEYVNRKTGEIKTAPLKCIAKSHPLFQEFRLWYFLSNIRVYQKEREVNGTLHLDVDVTTEFLKTEDDYVALFDWLNSRKEIDQKAFLRYPAFGLKKEINNYRWNYVEDKFYPCNETRHAILSRLEKAGIGIDFLSDEKETALWHILYSVSDKQEIEKALATFAVKNGLNESFVEVFKKFPPFKSEYGAYSAKAIKKLLPLMRCGKYWDMSLIDGTTKERIERIIAGECDESIGAKVREKAMNLSDISCFKRLPLWLACYVVYNRHSEDKEITKWETPADIDAYLAAFKQHSLRNPIVEQVITETLRVVRDIWKQVGKIDEIRIELGREMKNPADKRKRMTTQILENENANLRIKALLAEFVNPEYGVENVRPYSPSQQEILRIYEDAVLKGEEQIPEDIDVILKKFNTSKLPTKSEFLRYKLWLEQKYRSPYTGELIPLAKLFTAAYEIEHVIPQSRYFDDSFSNKVICESAVNKLKDNQLGYEFIKNHHGQKVEVGFGKTVEIFSVDSYERFVKEQYAKSGIKMKKLLMDDIPEQFIERQLNDSRYISKVVKGLLSNIVREKNDSGEYEPEAVSKNILVCTGSVTDRLKKDWGMNDVWNSIVSPRFERLNALTETQCFGHWENKDGKKVFQTAVPLEYQKGFSKKRIDHRHHAMDAIVIACATRNHVNYLNNESASRNAKISRYDLQRLLCDKSRGDGNGNYRWIIKKPWTTFTQDAREALSGIIVSLKQNLRIINKTTNIYQHFDANGTRVYEKQKIGDSWAIRKPMHKDTVFGAVNLRKALIPQHYNLTLFISS

SEQ ID NO: 837 - protein, 1504 aa, Bacteroides vulgatus
MKNIVGLDLGTNSIGWAVVNGSVNDDGSEQLVKIQASGSRIIPMDAAMIGDFNKGNSISQTAERTRLRGVRRLSERYLLRRERLHRILDILGFLPFHFAQDLDRHGKIVKGKEPKLAWRKNEAGQFEFIFQDSFKEMLEDFKLNHPNLITDDKKVPYDWTIYYLRKKGLTSKISKEELAWILLNFNQKRGYYQLRGEEEEENKNKLVEFYALKVVAVEDSGEKKGKDIWYNVHLENGWVYRRTSNMPLDWVGKTKEFIVTTDLEKDGTPKKDKEGNVKRSFRAPKEDDWSLLKKKTEADIDQTHKTVGVYIYDTLLGNPSQKIRGRLVRTIERKYYKEELKQILEKQKEFHLELQDRALYAACIEELYPINEAHRNNVGNRDFTYLFLEDILFYQRPLKSKKSLIDNCPYEENQGLDKETGEIKSFPVKCIAKSHPLFQEFRLWQFIVNLRIYRKDLAQDVDVTNELLKTEEDYVALFDWLNGKKEIDQKAFLKYPVFGLKKEIENYRWNYVQDKPYPCNETRSLMLARLEKCDISIEFLTKENEEALWHILYSVEDKNEIVKALQKFADKHDLNASFVDVFQKFPPFKKEYGSYSAKAIKKLLPLMRMGKYWSENSIDKGTRERIDKIITGEYDEKIENRVREKAIHLADVSDFKGLPLWLVCYIVYGRHSEAKEITQWKSPADIDSYLRSFKQHSLRNPIVEQIIIETLRVVRDIWKQVGNIDEIHVELGREMKNPADKRKKMTQQMSENENTNLRIKYLLTEFLNPEYEVENVRPYSPSQQDILRIYEEGVLNSVSDLPEEISDILKKFTETDLKKRPSRSEILRYKLWLEQKYRSPYTGEVIPLGKLFTPAYEIEHVIPQSCYFDDSFSNKVICEAEVNKLKSNLLGHEFIVKHHGEIVELPFGKKVRIFTVDEYEQFVKDNYSRTRSKMKKLLMDDIPEEFVTRQLNDSRYISKVVKSLLSNIVREKGEEEAISKNVIPCTGGVTDRLKKDWGINEVWNKIILPRFQRLNELTGTNKFTTKNVGIQEIPTMPLELQKGFNKKRIDHRHHAMDAIIIACANRNIINYLNNESATAKAELSRYDLQKMLCDKAKTDNNGNYKWVIRKPWASFTQDTYLALENIIVSFKQNLRVINKATNRFLHYNEEGKKIFVKQGKGDNWAIRKSMHKDTVFGEVNLRRIKTVALNEAMKNPQSIVVKDFKRKLLELWNLGFDAKRIKKYFEDNRETWSDINLSKIEVYYFSKDTKDRFFATRKPLDTSFDRKKIENNITDTGIQKILLRHLELKDNNPDIAFSPDGIDEMNRNIIQLNNGKYHQPIIKIRWYEQADKFAVGQTGNKFSKFVEAAKGTNLFFAVYESNILDKKTNTIIKKRNYATIPLNVAIERQKQGLPVAPEDENGNDPIFVLSPNDLVYLPTDDELANGIIAQPLDRGRIYKMVSCTGNEGHFIPARIANPILQTIELGSNNKAQKAWTDEMIKEICMPIKVDRLGNVLESSSSYKK

SEQ ID NO: 838 - protein, 1153 aa, Barnesiella intestinihominis
MKNILGLDLGLSSIGWSVIRENSEEQELVAMGSRVVSLTAAELSSFTQGNGVSINSQRTQKRTQRKGYDRYQLRRTLLRNKLDTLGMLPDDSLSYLPKLQLWGLRAKAVTQRIELNELGRVLLHLNQKRGYKSIKSDFSGDKKITDYVKTVKTRYDELKEMRLTIGELFFRRLTENAFFRCKEQVYPRQAYVEEFDCIMNCQRKFYPDILTDETIRCIRDEIIYYQRPLKSCKYLVSRCEFEKRFYLNAAGKKTEAGPKVSPRTSPLFQVCRLWESINNIVVKDRRNEIVFISAEQRAALFDFLNTHEKLKGSDLLKLLGLSKTYGYRLGEQFKTGIQGNKTRVEIERALGNYPDKKRLLQFNLQEESSSMVNTETGEIIPMISLSFEQEPLYRLWHVLYSIDDREQLQSVLRQKFGIDDDEVLERLSAIDLVKAGFGNKSSKAIRRILPFLQLGMNYAEACEAAGYNHSNNYTKAENEARALLDRLPAIKKNELRQPVVEKILNQMVNVVNALMEKYGRFDEIRVELARELKQSKEERSNTYKSINKNQRENEQIAKRIVEYGVPTRSRIQKYKMWEESKHCCIYCGQPVDVGDFLRGFDVEVEHIIPKSLYFDDSFANKVCSCRSCNKEKNNRTAYDYMKSKGEKALSDYVERVNTMYTNNQISKTKWQNLLTPVDKISIDFIDRQLRESQYIARKAKEILTSICYNVTATSGSVTSFLRHVWGWDTVLHDLNFDRYKKVGLTEVIEVNHRGSVIRREQIKDWSKRFDHRHHAIDALTIACTKQAYIQRLNNLRAEEGPDFNKMSLERYIQSQPHFSVAQVREAVDRILVSFRAGKRAVTPGKRYIRKNRKRISVQSVLIPRGALSEESVYGVIHVWEKDEQGHVIQKQRAVMKYPITSINREMLDKEKVVDKRIHRILSGRLAQYNDNPKEAFAKPVYIDKECRIPIRTVRCFAKPAINTLVPLKKDDKGNPVAWVNPGNNHHVAIYRDEDGKYKERTVTFWEAVDRCRVGIPAIVTQPDTIWDNILQRNDISENVLESLPDVKWQFVLSLQQNEMFILGMNEEDYRYAMDQQDYALLNKYLYRVQKLSKSDYSFRYHTETSVEDKYDGKPNLKLSMQMGKLKRVSIKSLLGLNPHKVHISVLGEIKEIS

SEQ ID NO: 839 - protein, 1352 aa, Belliella baltica
MKKILGLDLGTTSIGWAFIKEPEKDVVGSEIVDMGVRIVPLSSDEENDFAKGNTISINADRTLKRGARRNLQRFKQRRNALLEIFKEKKLISTNFKYAEDGPSSTFSTLNLRAKAAKEKIELQDLVKVLLQINKKRGYKSSRKAKSEEDDGSAIDSMGIAKELYENDLTPGQWVYEALQKGRKNVPDFYRSDLQEEFKKIVNYQSEFFPDIFNASFVEDWMGKASTPTKQYFNKKGVQLAENKGKREERRLQEYKWRAEAVNFKIDLSEIALILSQINSQISNSSGYLGAISDRSKELYFKNLTVGQYLYQQIKKNPHTRLKGQVFYRQDYLDEFERIWSVQSSFYPQLNDALKREVRDITIFFQRRLKSQKHLISNCEFEDHHKVVPKSHPVFQEFRIWQNLNNLLLIKKDNLNEKFDLELESKIALANELAFKRELNVKDALKILGLKPNEWEFNFTKIEGNRTNQAFFDAFAKIIELEDGEPIDLGDLKADDILDQFSEAFLRIGIDTELLQVNSDIEGAEYEKQSYIQFWHLLYSSEDDQKLKLNLIRKFGFKPEHAKILASISLQDDHASLSSRAIKKILPHLQSGLIYDKACTYAGYNHSSSFTKDENEKRELRAELELLKKNSLRNPVVEKILNQMINVVNAILKDPELGRPDEIRVEMARELKANAEQRKNMTSNIASATRDHDKYREILKSEFGLKRVTKNDLLRYKLWLETDGISLYTGKPIEASKLFSKEYDIEHIIPKARLFDDSFSNKTICERQLNIDKANVTAFSFLQNKLSADEFEQYQSRVKSLYGKLSKAKIQKLLMANDKIPEDFIARQLQETRYISKKAKEILFEISRRVSVTTGTITDKLREDWGLVEIMKELNWEKYDKLGLTYTIEGKHGERLNKIKDWSKRNDHRHHAMDALTVALTKPAYIQYLNNLNAKGLNNKKGTEVFAIEQKYLKRENGKLCFIPPIENIRSEAKKHLSRILVSYKAKNKVVTINKNKTKSKAGLNEQIALTPRGQLHKETVYGKSFHYSTKFEKIGASFNVQKINTVAKKEEREALLKRLAENGNDPKKAFTGKNTLNKMPIYLDLGKNIKLSEKVKTVVLEQNYTIRKNIDPDLKVDKVIDVGIKRILESRLEEFGGNAKLAFSNLEENPIWLNKEKGISIKRVKISGVSNVESLHVKKDHFGEPILDQEGNEIPVDFVSTGNNHHVAIYEDENGNLQEEVVSFFEAVVRQNQGLPIIKKNHTLGWKFLFTLKQNEYFVFPSDDFVPADVDLMDEQNYHLISPNLFRVQKIARKNYVFNNHLETKAVDNDLLKSKKELSKITYHFYQTPEHLRGIIKIRINHLGKIIQIGEY

SEQ ID NO: 840 - protein, 1415 aa, Bergeyella zoohelcum
MKHILGLDLGTNSIGWALIERNIEEKYGKIIGMGSRIVPMGAELSKFEQGQAQTKNADRRTNRGARRLNKRYKQRRNKLIYILQKLDMLPSQIKLKEDFSDPNKIDKITILPISKKQEQLTAFDLVSLRVKALTEKVGLEDLGKIIYKYNQLRGYAGGSLEPEKEDIFDEEQSKDKKNKSFIAFSKIVFLGEPQEEIFKNKKLNRRAIIVETEEGNFEGSTFLENIKVGDSLELLINISASKSGDTITIKLPNKTNWRKKMENIENQLKEKSKEMGREFYISEFLLELLKENRWAKIRNNTILRARYESEFEAIWNEQVKHYPFLENLDKKTLIEIVSFIFPGEKESQKKYRELGLEKGLKYIIKNQVVFYQRELKDQSHLISDCRYEPNEKAIAKSHPVFQEYKVWEQINKLIVNTKIEAGTNRKGEKKYKYIDRPIPTALKEWIFEELQNKKEITFSAIFKKLKAEFDLREGIDFLNGMSPKDKLKGNETKLQLQKSLGELWDVLGLDSINRQIELWNILYNEKGNEYDLTSDRTSKVLEFINKYGNNIVDDNAEETAIRISKIKFARAYSSLSLKAVERILPLVRAGKYFNNDFSQQLQSKILKLLNENVEDPFAKAAQTYLDNNQSVLSEGGVGNSIATILVYDKHTAKEYSHDELYKSYKEINLLKQGDLRNPLVEQIINEALVLIRDIWKNYGIKPNEIRVELARDLKNSAKERATIHKRNKDNQTINNKIKETLVKNKKELSLANIEKVKLWEAQRHLSPYTGQPIPLSDLFDKEKYDVDHIIPISRYFDDSFTNKVISEKSVNQEKANRTAMEYFEVGSLKYSIFTKEQFIAHVNEYFSGVKRKNLLATSIPEDPVQRQIKDTQYIAIRVKEELNKIVGNENVKTTTGSITDYLRNHWGLTDKFKLLLKERYEALLESEKFLEAEYDNYKKDFDSRKKEYEEKEVLFEEQELTREEFIKEYKENYIRYKKNKLIIKGWSKRIDHRHHAIDALIVACTEPAHIKRLNDLNKVLQDWLVEHKSEFMPNFEGSNSELLEEILSLPENERTEIFTQIEKFRAIEMPWKGFPEQVEQKLKEIIISHKPKDKLLLQYNKAGDRQIKLRGQLHEGTLYGISQGKEAYRIPLTKFGGSKFATEKNIQKIVSPFLSGFIANHLKEYNNKKEEAFSAEGIMDLNNKLAQYRNEKGELKPHTPISTVKIYYKDPSKNKKKKDEEDLSLQKLDREKAFNEKLYVKTGDNYLFAVLEGEIKTKKTSQIKRLYDIISFFDATNFLKEEFRNAPDKKTFDKDLLFRQYFEERNKAKLLFTLKQGDFVYLPNENEEVILDKESPLYNQYWGDLKERGKNIYVVQKFSKKQIYFIKHTIADIIKKDVEFGSQNCYETVEGRSIKENCFKLEIDRLGNIVKVIKR

SEQ ID NO: 841 - protein, 1430 aa, Bergeyella zoohelcum
MKHILGLDLGTNSIGWAVVKEAQNDNEQSEIVDVGVRVNPLTTDEKTNFEKGKPISTNADRTLKRSARRNLQRYKLRRKELIELLKEHQLISTDTILTENGKGTTFQTLELRAKSAKEKISLEELARVFLTINKKRGYKSSRKAKNEDEGQLIDGMEIAKRLYEENLTTGQLSLQLLKEGKKSLPDYYRSDLQFELDKVWNFQKQFHSDILTDEFYAQLKGKGQRATSALFLAKYQIYTAENKGSREDKKLQAYQWRVDALSKELTREQLAFVITEINNNLNNSSGYLGAISDRSKELYFNNETVGEYLWKQIAANPHTSLKNQVFYRQDYLDEFEQIWKTQSAFYPEILTDELKKELRDVVIFYQRKLKSQKSLVSFCEFENKEIEIKKEDGTSTKKVIGLKVAPKSSPLFQEFKIWQNLNNVLIRKKGSKTKKVAKNQQAVLFEEEKTISELDLEAKQALFNELNLKGNLKADYCLEILGYSPKEWEMNYSVLEGNRTNKALYEAYLKITDLEGYDAKNHLKVKLNKDEVELDDLKVPASEIKDMVQAIFKEAGINTDILHFNAELDGKDFENQASYQLWHLLYSYEGDDSKSGNELLYKLLETKFGFKKEYAQILANVSLSDDYGSLSTKAMRKIHPYIKENKFSTACELAGYRHSKHSLTKEENDNRVLKDSLEVLKKNSLRQPVVEKILNQMINLVNALLKKYRTENPNFKFDEIRIELARELKKNAEERANMTANINKAKTEHEKIIKILKNEFGLPNPTRNDIIRYRLYEELKANGYKDLYTNIKIPQEKLFTKEIDIEHIIPKSRVFDDSFSNKTLSFRKTNLDKGERTAFDYMESKFGADKLEEYVARVEDLYKNNIISKAKYQKLLKKESEIGDGFVERDLRETQYIAKKAKEILLQITPNVLSTSGGITDRLREDWDLINVMKELNLPKYRALGLTQMEDRKYGQQVEVITDWTKRNDHRHHAMDALTVAFTKHNHIQYLNYLNARKNEKHKEHSNIMGIQQLETIKVTDKNGNEKRVFKAPMPNFRQVTKAFLENILISHKAKNKVVTKNKNKVAGSNKVQEVLTPRGQLHKETVYGKYQYYVQKEEKIGAKFDLETIKKVANPLYQSLLKKRLEENGGDPKKAFTGKNSLAKNPIYLDDTQTEQLPEKVKLVWLENSFSIRKDITPENFKDEKLIDKILDEGVKRILKERLQSFGNDAKKAFSDLDKNPIWLNKEKGITIKRVTISGVANAEPLHTKKDHLGKEILDKEGKPIPVDFISTGSNHHVAVYRDEKGNLQEKVVSVFEAVVRANQGLPIIDKTYNQHLGWEFLFTMKQNEMFVFPNESTGFNPNDIDLLDPKNKRIISPNLFRVQKFSKLQYGNSFVREFVFRHHLETTVEDRKELQGITYKQMKNSTFFNDIIKVRINHLGDIVSIGEY

SEQ ID NO: 842 - protein, 1281 aa, Bifidobacterium bifidum
MEDDSQHDIREIYLAIHHMVKYRGNFLVEGTLESSNAFKEDELLKLLGRITRYEMSEGEQNSDIEQDDENKLVAPANGQLADALCATRGSRSMRVDNALEALSAVNDLSREQRAIVKAIFAGLEGNKLDLAKIFVSKEFSSENKKILGIYFNKSDYEEKCVQIVDSGLLDDEEREFLDRMQGQYNAIALKQLLGRSTSVSDSKCASYDAHRANWNLIKLQLRTKENEKDINENYGILVGWKIDSGQRKSVRGESAYENMRKKANVFFKKMIETSDLSETDKNRLIHDIEEDKLFPIQRDSDNGVIPHQLHQNELKQIIKKQGKYYPFLLDAFEKDGKQINKIEGLLAFRVPYFVGPLVVPEDLQKSDNSENHWMVRKKKGEITPWNFDEMVDKDASGRKFIERLVGTDSYLLGEPTLPKNSLLYQEYEVLNELNNVRLSVRTGNHWNDKRRMRLGREEKTLLCQRLFMKGQTVTKRTAENLLRKEYGRTYELSGLSDESKFTSSLSTYGKMCRIFGEKYVNEHRDLMEKIVELQTVFEDKETLLHQLRQLEGISEADCALLVNTHYTGWGRLSRKLLTTKAGECKISDDFAPRKHSIIEIMRAEDRNLMEIITDKQLGFSDWIEQENLGAENGSSLMEVVDDLRVSPKVKRGIIQSIRLIDDISKAVGKRPSRIFLELADDIQPSGRTISRKSRLQDLYRNANLGKEFKGIADELNACSDKDLQDDRLFLYYTQLGKDMYTGEELDLDRLSSAYDIDHIIPQAVTQNDSIDNRVLVARAENARKTDSFTYMPQIADRMRNFWQILLDNGLISRVKFERLTRQNEFSEREKERFVQRSLVETRQIMKNVATLMRQRYGNSAAVIGLNAELTKEMHRYLGFSHKNRDINDYHHAQDALCVGIAGQFAANRGFFADGEVSDGAQNSYNQYLRDYLRGYREKLSAEDRKQGRAFGFIVGSMRSQDEQKRVNPRTGEVVWSEEDKDYLRKVMNYRKMLVTQKVGDDFGALYDETRYAATDPKGIKGIPFDGAKQDTSLYGGFSSAKPAYAVLIESKGKTRLVNVTMQEYSLLGDRPSDDELRKVLAKKKSEYAKANILLRHVPKMQLIRYGGGLMVIKSAGELNNAQQLWLPYEEYCYFDDLSQGKGSLEKDDLKKLLDSILGSVQCLYPWHRFTEEELADLHVAFDKLPEDEKKNVITGIVSALHADAKTANLSIVGMTGSWRRMNNKSGYTFSDEDEFIFQSPSGLFEKRVTVGELKRKAKKEVNSKYRTNEKRLPTLSGASQP

SEQ ID NO: 843 - protein, 1121 aa, Bifidobacterium dentium
MSVGLAAIEVDETGFPIRILNIQSVIHDGGIDPQLGKKKSISRKAISGVARRTRRMRRRKVVRLRQLDATLESLGFPIVEPDSLDTWEIWLTRAKLASSYIQDDETRKEDVSIALRHIARHRGWRNPYSNVESLFVDVAPSEQYEELRRKAEEKLGTSLSGNPTSAEIVECILKRQVGEVQLRTRSRKGVNGNAVEKEGLLPTKLMQSDNAAEIRRIFKVQRIDDETGRKLLRAVFKACSPKGSVERRVGRDALAPGLPRALKASLAFQEYRIANVLTNLVISEDGTKRKLTIAEKQRVFGFLSSNETDDITWIDVAEKLGLERRQIQGVGCLTADGEERISSTPPRNITALHIHSAKPVIREKLVAWWKAASPTVRETMVELLSNTVDIDRVREDMDYSSAVAFIDSLGDEELTALDSVDLLSGRAAYSRQTLKQLTERMLNTDDDLHEARKAVFGVDDNWKPPVDAISTSVGNPAVDRVLKIVNRYLLACQKRWRNPQSVQIEHVRESFSSVAKAKETERVQGERARYRNDLRRELCEQEGLNKIRESDIRRWESVQRQNGTCLYCGSPITFRTCEMDHIVPRKGVGSTNTRVNLAAACAACNKLKSNTAFSVWARTEGAANRKVSQRDAIERVKTFIFNKSVPPREQRAFKQAVISRLRQAESDPAIDNRSIESVAWMADELHRRIEAYFNQDADVSGNTPATQVWVFQGRVTALARKASGIEGRIHFAGEWKKTRLDRRHHAVDAAVIAMMNHSAAQTLVERDSLRLSQWITRKPETWKNYPFSEGQKKTRFKEWLDCMNALLDLLNDALDSDRVPVTRCQRMSLGNSQAHAATIRKMKRVELFSPMDADLIRRASTPALYCALTRLPEYSPEKGLPENRGREIVLNGRHIRSTETVDFFASGAAQLMVRNGSAEIGDSIHHMRIYRYRKTGAKSQEYVYGMIRVFQIDLLHASSENLFAVQLPSQSVSVRYGDKNVVQAIQEGRAEYLGHIVPNDEILISYEGVRMKDSEKIGAYANDFSGTASELAQRRHWVVVGSDVSKLALRPSYLSEEGLENSGSESERLSKQTRKVIEGKGWVVAVNILAKYHPVVIRRNALGEPRFRTNSGMPVSWRWDR

SEQ ID NO: 844 - protein, 354 aa, Bifidobacterium longum
AKQYVNSASIDDAEAETMKTTVSVFQGRVTASARRAAGIEGKIHFIGQQSKTRLDRRHHAVDASVIAMMNTAAAQTLMERESLRESQRLIGLMPGERSWKEYPYEGTSRYESFHLWLDNMDVLLELLNDALDNDRIAVMQSQRYVLGNSIAHDATIHPLEKVPLGSAMSADLIRRASTPALWCALTRLPDYDEKEGLPEDSHREIRVHDTRYSADDEMGFFASQAAQIAVQEGSADIGSAIHHARVYRCWKTNAKGVRKYFYGMIRVFQTDLLRACHDDLFTVPLPPQSISMRYGEPRVVQALQSGNAQYLGSLVVGDEIEMDFSSLDVDGQIGEYLQFFSQFSGGNLAWKHWV

SEQ ID NO: 845 - protein, 1124 aa, Bifidobacterium longum
LTGHSGHTFWPTSSSPPIQLEQEKRPLPQRNTSQNGHTFWPITRERCFMRGKRYRIGIDVGLNSVGLAAVEVSDENSPVRLLNAQSVIHDGGVDPQKNKEAITRKNMSGVARRTRRMRRRKRERLHKLDMLLGKFGYPVIEPESLDKPFEEWHVRAELATRYIEDDELRRESISIALRHMARHRGWRNPYRQVDSLISDNPYSKQYGELKEKAKAYNDDATAAEEESTPAQLVVAMLDAGYAEAPRLRWRTGSKKPDAEGYLPVRLMQEDNANELKQIFRVQRVPADEWKPLFRSVFYAVSPKGSAEQRVGQDPLAPEQARALKASLAFQEYRIANVITNLRIKDASAELRKLTVDEKQSIYDQLVSPSSEDITWSDLCDFLGFKRSQLKGVGSLTEDGEERISSRPPRLTSVQRIYESDNKIRKPLVAWWKSASDNEHEAMIRLLSNTVDIDKVREDVAYASAIEFIDGLDDDALTKLDSVDLPSGRAAYSVETLQKLTRQMLTTDDDLHEARKTLFNVTDSWRPPADPIGEPLGNPSVDRVLKNVNRYLMNCQQRWGNPVSVNIEHVRSSFSSVAFARKDKREYEKNNEKRSIFRSSLSEQLRADEQMEKVRESDLRRLEAIQRQNGQCLYCGRTITFRTCEMDHIVPRKGVGSTNTRTNFAAVCAECNRMKSNTPFAIWARSEDAQTRGVSLAEAKKRVTMFTFNPKSYAPREVKAFKQAVIARLQQTEDDAAIDNRSIESVAWMADELHRRIDWYFNAKQYVNSASIDDAEAETMKTTVSVFQGRVTASARRAAGIEGKIHFIGQQSKTRLDRRHHAVDASVIAMMNTAAAQTLMERESLRESQRLIGLMPGERSWKEYPYEGTSRYESFHLWLDNMDVLLELLNDALDNDRIAVMQSQRYVLGNSIAHDATIHPLEKVPLGSAMSADLIRRASTPALWCALTRLPDYDEKEGLPEDSHREIRVHDTRYSADDEMGFFASQAAQIAVQEGSADIGSAIHHARVYRCWKTNAKGVRKYFYGMIRVFQTDLLRACHDDLFTVPLPPQSISMRYGEPRVVQALQSGNAQYLGSLVVGDEIEMDFPVSMLMVRLASIYNSSRSLVEGTLHGNIGLLMDSLTRRS

SEQ ID NO: 846 - protein, 166 aa, Bifidobacterium longum
MGLAAVEVSDENSPVRLLNAQSVIHDGGVDPQKNKEAITRKNMSGVARRTRRMRRRKRERLHKLDMLLGKFGYPVIEPESLDKPFEEWHVRAELATRYIEDDELRRESISIALRHMARHRGWRNPYRQVDSLISDNPYSKQYGELKEKAKAYNDDATAAEEESTPA

SEQ ID NO: 847 - protein, 1138 aa, Bifidobacterium longum
MNSVGLAAVEVSDENSPVRLLNAQSVIHDGGVDPQKNKEAITRKNMSGVARRTRRMRRRKRERLHKLDMLLGKFGYPVIEPESLDKPFEEWHVRAELATRYIEDDELRRESISIALRHMARHRGWRNPYRQVDSLISDNPYSKQYGELKEKAKAYNDDATAAEEESTPAQLVVAMLDAGYAEAPRLRWRTGSKKPDAEGYLPVRLMQEDNANELKQIFRVQRVPADEWKPLFRSVFYAVSPKGSAEQRVGQDPLAPEQARALKASLAFQEYRIANVITNLRIKDASAELRKLTVDEKQSIYDQLVSPSSEDITWSDLCDFLGFKRSQLKGVGSLTEDGEERISSRPPRLTSVQRIYESDNKIRKPLVAWWKSASDNEHEAMIRLLSNTVDIDKVREDVAYASAIEFIDGLDDDALTKLDSVDLPSGRAAYSVETLQKLTRQMLTTDDDLHEARKTLFNVTDSWRPPADPIGEPLGNPSVDRVLKNVNRYLMNCQQRWGNPVSVNIEHVRSSFSSVAFARKDKREYEKNNEKRSIFRSSLSEQLRADEQMEKVRESDLRRLEAIQRQNGQCLYCGRTITFRTCEMDHIVPRKGVGSTNTRTNFAAVCAECNRMKSNTPFAIWARSEDAQTRGVSLAEAKKRVTMFTFNPKSYAPREVKAFKQAVIARLQQTEDDAAIDNRSIESVAWMADELHRRIDWYFNAKQYVNSASIDDAEAETMKTTVSVFQGRVTASARRAAGIEGKIHFIGQQSKTRLDRRHHAVDASVIAMMNTAAAQTLMERESLRESQRLIGLMPGERSWKEYPYEGTSRYESFHLWLDNMDVLLELLNDALDNDRIAVMQSQRYVLGNSIAHDATIHPLEKVPLGSAMSADLIRRASTPALWCALTRLPDYDEKEGLPEDSHREIRVHDTRYSADDEMGFFASQAAQIAVQEGSADIGSAIHHARVYRCWKTNAKGVRKYFYGMIRVFQTDLLRACHDDLFTVPLPPQSISMRYGEPRVVQALQSGNAQYLGSLVVGDEIEMDFSSLDVDGQIGEYLQFFSQFSGGNLAWKHWVVDGFFNQTQLRIRPRYLAAEGLAKAFSDDVVPDGVQKIVTKQGWLPPVNTASKTAVRIVRRNAFGEPRLSSAHHMPCSWQWRHE

SEQ ID NO: 848 - protein, 182 aa, Bifidobacterium longum
MRGKRYRIGIDVGLNSVGLAAVEVSDENSPVRLLNAQSVIHDGGVDPQKNKEAITRKNMSGVARRTRRMRRRKRERLHKLDMLLGKFGYPVIEPESLDKPFEEWHVRAELATRYIEDDELRRESISIALRHMARHRGWRNPYRQVDSLISDNPYSKQYGELKEKAKAYNDDATAAEEESTPA

SEQ ID NO: 849 - protein, 441 aa, Bifidobacterium longum
MVAMLDAGYAEAPRLRWRTGSKKPDAEGYLPVRLMQEDNANELKQIFRVQRVPADEWKPLFRSVFYAVSPKGSAEQRVGQDPLAPEQARALKASLAFQEYRIANVITNLRIKDASAELRKLTVDEKQSIYDQLVSPSSEDITWSDLCDFLGFKRSQLKGVGSLTEDGEERISSRPPRLTSVQRIYESDNKIRKPLVAWWKSASDNEHEAMIRLLSNTVDIDKVREDVAYASAIEFIDGLDDDALTKLDSVDLPSGRAAYSVETLQKLTRQMLTTDDDLHEARKTLFNVTDSWRPPADPIGEPLGNPSVDRVLKNVNRYLMNCQQRWGNPVSVNIEHVRSSFSSVAFARKDKREYEKNNEKRSIFRSSLSEQLRADEQMEKVRESDLRRLEAIQRQNGQCLYCGRTITFRTCEMDHIVPRKGVGSTNTRTNFAAVCAECNRM

SEQ ID NO: 850 - protein, 967 aa, Bifidobacterium longum
MVAMLDAGYAEAPRLRWRTGSKKPDAEGYLPVRLMQEDNANELKQIFRVQRVPADEWKPLFRSVFYAVSPKGSAEQRVGQDPLAPEQARALKASLAFQEYRIANVITNLRIKDASAELRKLTVDEKQSIYDQLVSPSSEDITWSDLCDFLGFKRSQLKGVGSLTEDGEERISSRPPRLTSVQRIYESDNKIRKPLVAWWKSASDNEHEAMIRLLSNTVDIDKVREDVAYASAIEFIDGLDDDALTKLDSVDLPSGRAAYSVETLQKLTRQMLTTDDDLHEARKTLFNVTDSWRPPADPIGEPLGNPSVDRVLKNVNRYLMNCQQRWGNPVSVNIEHVRSSFSSVAFARKDKREYEKNNEKRSIFRSSLSEQLRADEQMEKVRESDLRRLEAIQRQNGQCLYCGRTITFRTCEMDHIVPRKGVGSTNTRTNFAAVCAECNRMKSNTPFAIWARSEDAQTRGVSLAEAKKRVTMFTFNPKSYAPREVKAFKQAVIARLQQTEDDAAIDNRSIESVAWMADELHRRIDWYFNAKQYVNSASIDDAEAETMKTTVSVFQGRVTASARRAAGIEGKIHFIGQQSKTRLDRRHHAVDASVIAMMNTAAAQTLMERESLRESQRLIGLMPGERSWKEYPYEGTSRYESFHLWLDNMDVLLELLNDALDNDRIAVMQSQRYVLGNSIAHDATIHPLEKVPLGSAMSADLIRRASTPALWCALTRLPDYDEKEGLPEDSHREIRVHDTRYSADDEMGFFASQAAQIAVQEGSADIGSAIHHARVYRCWKTNAKGVRKYFYGMIRVFQTDLLRACHDDLFTVPLPPQSISMRYGEPRVVQALQSGNAQYLGSLVVGDEIEMDFSSLDVDGQIGEYLQFFSQFSGGNLAWKHWVVDGFFNQTQLRIRPRYLAAEGLAKAFSDDVVPDGVQKIVTKQGWLPPVNTASKTAVRIVRRNAFGEPRLSSAHHMPCSWQWRHE

SEQ ID NO: 851 - protein, 1151 aa, Bifidobacterium sp.
MRGKRYRIGIDVGLNSVGLAAVEVSDENSPVRLLNAQSVIHDGGVDPQKNKEAITRKNMSGVARRTRRMRRRKRERLHKLDMLLGKFGYPVIEPESLDKPFEEWHVRAELATRYIEDDELRRESISIALRHMARHRGWRNPYRQVDSLISDNPYSKQYGELKEKAKAYNDDATAAEEESTPAQLVVAMLDAGYAEAPRLRWRTGSKKPDAEGYLPVRLMQEDNANELKQIFRVQRVPADEWKPLFRSVFYAVSPKGSAEQRVGQDPLAPEQARALKASLAFQEYRIANVITNLRIKDASAELRKLTVDEKQSIYDQLVSPSSEDITWSDLCDFLGFKRSQLKGVGSLTEDGEERISSRPPRLTSVQRIYESDNKIRKPLVAWWKSASDNEHEAMIRLLSNTVDIDKVREDVAYASAIEFIDGLDDDALTKLDSVDLPSGRAAYSVETLQKLTRQMLTTDDDLHEARKTLFNVTDSWRPPADPIGEPLGNPSVDRVLKNVNRYLMNCQQRWGNPVSVNIEHVRSSFSSVAFARKDKREYEKNNEKRSIFRSSLSEQLRADEQMEKVRESDLRRLEAIQRQNGQCLYCGRTITFRTCEMDHIVPRKGVGSTNTRTNFAAVCAECNRMKSNTPFAIWARSEDAQTRGVSLAEAKKRVTMFTFNPKSYAPREVKAFKQAVIARLQQTEDDAAIDNRSIESVAWMADELHRRIDWYFNAKQYVNSASIDDAEAETMKTTVSVFQGRVTASARRAAGIEGKIHFIGQQSKTRLDRRHHAVDASVIAMMNTAAAQTLMERESLRESQRLIGLMPGERSWKEYPYEGTSRYESFHLWLDNMDVLLELLNDALDNDRIAVMQSQRYVLGNSIAHDATIHPLEKVPLGSAMSADLIRRASTPALWCALTRLPDYDEKEGLPEDSHREIRVHDTRYSADDEMGFFASQAAQIAVQEGSADIGSAIHHARVYRCWKTNAKGVRKYFYGMIRVFQTDLLRACHDDLFTVPLPPQSISMRYGEPRVVQALQSGNAQYLGSLVVGDEIEMDFSSLDVDGQIGEYLQFFSQFSGGNLAWKHWVVDGFFNQTQLRIRPRYLAAEGLAKAFSDDVVPDGVQKIVTKQGWLPPVNTASKTAVRIVRRNAFGEPRLSSAHHMPCSWQWRHE

SEQ ID NO: 852 - protein, 1092 aa, Brevibacillus laterosporus
MAYTMGIDVGIASCGWAIVDLERQRIIDIGVRTFEKAENPKNGEALAVPRREARSSRRRLRRKKHRIERLKYMFVRNGLAVDIQHLEQTLRSQNEIDVWQLRVDGLDRMLTQKEWLRVLIHLAQRRGFQSNRKTDGSSEDGQVLVNVTENDRLMEEKDYRTVAEMMVKDEKFSDHKRNKNGNYHGVVSRASLLVEIHTLFESQRQHHNFLASKDFELEYINIWSSQRPVATKDQIEKMIGTCTFLPKEKRAPKASWHFQYFMLLQTINHIRITNAQGTRPLNKEEIEQVVNMALTKSKVSYHDIRKVLDLSEEYQFVGLDYGKEDEKKKVESKETIIKLDDYHKLNKIFNEVELAKGETWEAVDYDTVAYALTFFKDDEDIRDYLQNKYKDSKNRLVKNVANKEYTNELIEKVSTLSFRKVGHLSLKALRKIIPFLEQGMTYDKACQAAGFNFQGISKKKRSVVLPVIDQISNPVVNRALTQTRKVINALIKKYGSPETIHIETARELSKRFDERKNITKDYKENRDKNERAKKHLSELGIINPTGLDIVKYKLWCEQQGRCMYSNQPISFERLRESGYTEVDHIIPYSRSMNDSYNNRVLVMTRENREKSNQTPYEYMGNDTQRWDEFEQRVTTNPQIKKEKRQNLLLKGFTNRRELEMLERNLNDTRHITKYLSHFISTNLEFSPSDKKKKVVNTSGRITSHLRSRWGLEKNREQNDLHHAMDAVVIAVTSDSFIQQVTNYYKRKERRELNGDDKFPLPWKFFREEVIARLSPNPKEQIEALPNHFYSEDELADLQPIFVSRMPKRSITGEAHQAQFRRVVGKTKEGKNITAKKTALVDISYDKNGDFNMYGRETDPATYEAIKERYLEFGGNAKKAFSTDLHKPKKDGTKGPLIKSVRIMENKTLVHPVNKGKGVVYNSSIVRTDVFQRKEKYYLLPVYVTDVTKGKLPNKVIAAKKGYDDWIEVDDSFTFLYSLYPNDLIFIRQNPKKKISLKKRIESHSISDSKEVQEILTYYKGVDSSTAAIEFITHDGSYYAKGVGVQNLDCFEKYQVDILGNYSKVKGEKRLELETSDNNHKGKDVNSIKSTSR

SEQ ID NO: 853 - protein, 103 aa, Butyrivibrio fibrisolvens
MISVGQSRKDLEDLGYEFKLSFYKEDIIEYEKNGDILVERFLSRTMPQVRNYIETKPIDRPKYDKRNPVGLSKTSSIRKITMDILGNRFYVDKMSFNNVVGTQ

SEQ ID NO: 854 - protein, 177 aa, Butyrivibrio fibrisolvens
MLIAFSQMGYDAYHELTNKYIDFETGEIIDKEGFNELLNNDLVYKNTMYESKWLKIKGNIEKAAEKNKYWYQVNKKCNRGLCNQTVYGTRESDGDVYKISKIDIRTDDGFKKFKNIVDKGNESVFLMYENDPKTFELIMDIYKNYSDSKNPFVQYEKETGDIIRKYSKKITGQRFLN

SEQ ID NO: 855 - protein, 1442 aa, Caenispirillum salinarum
MPVLSPLSPNAAQGRRRWSLALDIGEGSIGWAVAEVDAEGRVLQLTGTGVTLFPSAWSNENGTYVAHGAADRAVRGQQQRHDSRRRRLAGLARLCAPVLERSPEDLKDLTRTPPKADPRAIFFLRADAARRPLDGPELFRVLHHMAAHRGIRLAELQEVDPPPESDADDAAPAATEDEDGTRRAAADERAFRRLMAEHMHRHGTQPTCGEIMAGRLRETPAGAQPVTRARDGLRVGGGVAVPTRALIEQEFDAIRAIQAPRHPDLPWDSLRRLVLDQAPIAVPPATPCLFLEELRRRGETFQGRTITREAIDRGLTVDPLIQALRIRETVGNLRLHERITEPDGRQRYVPRAMPELGLSHGELTAPERDTLVRALMHDPDGLAAKDGRIPYTRLRKLIGYDNSPVCFAQERDTSGGGITVNPTDPLMARWIDGWVDLPLKARSLYVRDVVARGADSAALARLLAEGAHGVPPVAAAAVPAATAAILESDIMQPGRYSVCPWAAEAILDAWANAPTEGFYDVTRGLFGFAPGEIVLEDLRRARGALLAHLPRTMAAARTPNRAAQQRGPLPAYESVIPSQLITSLRRAHKGRAADWSAADPEERNPFLRTWTGNAATDHILNQVRKTANEVITKYGNRRGWDPLPSRITVELAREAKHGVIRRNEIAKENRENEGRRKKESAALDTFCQDNTVSWQAGGLPKERAALRLRLAQRQEFFCPYCAERPKLRATDLFSPAETEIDHVIERRMGGDGPDNLVLAHKDCNNAKGKKTPHEHAGDLLDSPALAALWQGWRKENADRLKGKGHKARTPREDKDFMDRVGWRFEEDARAKAEENQERRGRRMLHDTARATRLARLYLAAAVMPEDPAEIGAPPVETPPSPEDPTGYTAIYRTISRVQPVNGSVTHMLRQRLLQRDKNRDYQTHHAEDACLLLLAGPAVVQAFNTEAAQHGADAPDDRPVDLMPTSDAYHQQRRARALGRVPLATVDAALADIVMPESDRQDPETGRVHWRLTRAGRGLKRRIDDLTRNCVILSRPRRPSETGTPGALHNATHYGRREITVDGRTDTVVTQRMNARDLVALLDNAKIVPAARLDAAAPGDTILKEICTEIADRHDRVVDPEGTHARRWISARLAALVPAHAEAVARDIAELADLDALADADRTPEQEARRSALRQSPYLGRAISAKKADGRARAREQEILTRALLDPHWGPRGLRHLIMREARAPSLVRIRANKTDAFGRPVPDAAVWVKTDGNAVSQLWRLTSVVTDDGRRIPLPKPIEKRIEISNLEYARLNGLDEGAGVTGNNAPPRPLRQDIDRLTPLWRDHGTAPGGYLGTAVGELEDKARSALRGKAMRQTLTDAGITAEAGWRLDSEGAVCDLEVAKGDTVKKDGKTYKVGVITQGIFGMPVDAAGSAPRTPEDCEKFEEQYGIKPWKAKGIPLA

SEQ ID NO: 856 - protein, 984 aa, Campylobacter coli
MARILAFDIGISSIGWAFSENDELKDCGVRIFTKAENPKTGESLALPRRLARSARKCLARRKARLNHLKHLIANEFKLNYEDYQSFDESLAKAYKGSLISPYELRFRALNELLSKQDFARVILHIAKRRGYDDIKNNGDEEKSEILKAIKQNEEKLVNYQSVGEYLYKEYFQKFKENSKEFINVRNKKESYERCIAQSFLKDELKLIFQKQREFGFSFSKKFEEEVLSVAFYKRALKDFSHLVGNCSFFTDEKRAPKNSPLAFMFVALTRIINLLNNLKNTEGILYTKDDLNALLNEVLKNGTLTYKQTKKLLGLSDDYEFKGEKGTYFIEFKKYKEFIKALGEHNLSQDDLNEIAKDITLIKDEIKLKKALAKYDLNQNQIDSLSKLEFKDHLNISFKALKLITPLMLEGKKYDEACNELNLKVAINEDKKDFLPAFNETYYKDEVTNPVVLRAIKEYRKVLNALLKKYGKVHKINIELAREVGKNHSQRAKIEKEQNENYKAKKDAELECEKLGLKINSKNILKLRLFKEQKEFCAYSGEKIKISDLQDEKMLEIDHIYPYSRSFDDSYMNKVLVFTKQNQEKLNQTPFEAFGNDSAKWQKIEVLAKNLPTKKQKRILDKNYKDKEQKNFKDRNLNDTRYIARLVLNYTKDYLDFLPLSDDENTKLNDTQKGSKVHVEAKSGMLTSALRHTWGFSAKDRNNHLHHAIDAVIIAYANNSIVKAFSDFKKEQESNSAELYAKKISELDYKNKRKFFEPFSGFRQKVLDKIDEIFVSKPERKKPSGALHEETFRKEEEFYQSYGGKEGVLKALELGKIRKVNGKIVKNGDMFRVDIFKHKKTNKFYAVPIYTMDFALKVLPNKAVARSKKGEIKDWILMDENYEFCFSLYKDSLILIQTKDMQEPEFVYYNAFTSSTVSLIVSKHDNKFETLSKNQKILFKNANEKEVIAKSIGIQNLKVFEKYIVSALGEVTKAEFRQREDFKK

SEQ ID NO: 857 - protein, 984 aa, Campylobacter coli
MARILAFDIGISSIGWAFSENDELKDCGVRIFTKAENPKTGESLALPRRLARSARKRLARRKARLNHLKHLIANEFKLNYEDYQSFDESLAKAYKGSLISPYELRFRALNELLSKQDFARVILHIAKRRGYDDIKNNGDEEKGKILKAIKQNEEKLVNYQSVGEYLYKEYFQKFKENSKEFINVRNKKESYERCITQSFLKYELKLIFQKQREFGFSFSKKFEEEVLSVAFYKRALKDFSHLVGNCSFFSDEKRAPKNSPLAFMFVALTRIINLLNNLKNTEGILYTKDDLNALLNEVLKNGTLTYKQTKKLLGLSDDYEFKGEKGTYFIEFKKYKEFIKALGEHNLSQDDLNEIAKDITLIKDEIKLKKALAKYDLNQNQIDSLSKLEFKDHLNISFKALKLITPLMLEGKKYDEACNELNLKVAINEDKKDFLPAFNETYYKDEVTNPVVLRAIKEYRKVLNALLKKYGKVHKINIELAREVGKNYSQRAKIEKEQNENYKAKKDAELECEKLGLKINSKNILKLRLFKEQKEFCAYSGEKIKISDLQDEKMLEIDHIYPYSRSFDDSYMNKVLVFTKQNQEKLNQTPFEAFGNDSAKWQKIEVLAKNLPTKKQKRILDKNYKDKEQKNFKDRNLNDTRYIARLVLNYTKDYLDFLPLSDDENTKLNDTQKGSKVHVEAKSGMLTSALRHTWGFSAKDRNNHLHHAIDAVIIAYANNSIVKAFSDFKKEQESNSAELYAKKISELDYKNKRKFFEPFSGFRQKVLDKIDEIFVSKPERKKPSGALHEETFRKEEEFYQSYGGKEGVLKALELGKIRKVNGKIVKNGDMFRVDIFKHKKTNKFYAVPIYTMDFALKVLPNKAVARSKKGEIKDWILMDENYEFCFSLYKDSLILIQTKDMQEPEFVYYNAFTSSTVSLIVSKHDNKFETLSKNQKILFKNANEKEVIAKSIGIQNLKVFEKYIVSALGEVTKAEFRQREDFKK

SEQ ID NO: 858 - protein, 984 aa, Campylobacter coli
MARILAFDIGISSIGWAFSENDELKDCGVRIFTKAENPKTGESLALPRRLARSARKRLARRKARLNHLKHLIANEFKLNYEDYQSFDESLAKAYKGSLISPYELRFRALNELLSKQDFARVILHIAKRRGYDDIKNNGDEEKSEILKAIKQNEEKLVNYQSVGEYLYKEYFQKFKENSKEFINVRNKKESYERCIAQSFLKDELKLIFQKQREFGFSFSKKFEEEVLSVAFYKRALKDFSHLVGNCSFFTDEKRAPKNSPLAFMFVALTRIINLLNNLKNTEGILYTKDDLNTLLNEVLKNGTLTYKQTKKLLGLSDDYEFKGEKGTYFIEFKKYKEFIKALGEHNLSQDNLNEIAKDITLIKDEIKLKKALAKYDLNQNQIDSLSKLEFKDHLNISFKALKLITPLMLEGKKYDEAYNELNLKVAINEDKKDFLPAFNETYYKDEVTNPVVLRAIKEYRKVLNALLKKYGKVHKINIELAREVGKNHSQRAKIEKEQNENYKAKKDAELECEKLGLKINSKNILKLRLFKEQKEFCAYSGEKIKISDLQDEKMLEIDHIYPYSRSFDDSYMNKVLVFTKQNQEKLNQTPFEAFGNDSAKWQKIEVLAKNLPTKKQKRILDKNYKDKEQKDFKDRNLNDTRYIARLVLNYTKDYLDFLPLSDDENTKLNDTQKGSKVHVEAKSGMLTSALRHTWGFSAKDRNNHLHHAIDAVIIAYANNSIVKAFSDFKKEQESNSAELYAKKISELDYKNKRKFFEPFSGFRQKVLDKIDEIFVSKPERKKPSGALHEETFRKEEEFYQSYGGKEGVLKALELGKIRKVNGKIVKNGDMFRVDIFKHKKTNKFYAVPIYTMDFALKVLPNKAVARSKKGEIKDWILMDENYEFCFSLYKDSLILIQTKDMQEPELVYFNAFTSSTVSLIVSKHDNKFETLSKNQKILFKNANEKEVIAKSIGIQNLKVFEKYIVSALGEVTKAEFRQREDFKK

SEQ ID NO: 859 - protein, 984 aa, Campylobacter coli
MARILAFDIGISSIGWAFSENDELKDCGVRIFTKAENPKTGESLALPRRLARSARKRLARRKARLNHLKHLIANEFKLNYEDYQSFDESLAKAYKGSLISPYELRFRALNELLSKQDFARVILHIAKRRGYDDIKNNGDEEKSEILKAIKQNEEKLVNYQSVGEYLYKEYFQKFKENSKEFINVRNKKESYERCIAQSFLKDELKLIFQKQREFGFSFSKKFEEEVLSVAFYKRALKDFSHLVGNCSFFTDEKRAPKNSPLAFMFVALTRIINLLNNLKNTEGILYTKDDLNALLNEVLKNGTLTYKQTKKLLGLSDDYEFKGEKGTYFIEFKKYKEFIKALGEHNLSQDDLNEIAKDITLIKDEIKLKKALAKYDLNQNQIDSLSKLEFKDHLNISFKALKLITPLMLEGKKYDEACNELNLKVAINEDKKDFLPAFNETYYKDEVTNPVVLRAIKEYRKVLNALLKKYGKVHKINIELAREVGKNYSQRAKIEKEQNENYKAKKDAELECEKLGLKINSKNILKLRLFKEQKEFCAYSGEKIKISDLQDEKMLEIDHIYPYSRSFDDSYMNKVLVFTKQNQEKLNQTPFEAFGNDSAKWQKIEVLAKNLPTKKQKRILDKNYKDKEQKNFKDRNLNDTRYIARLVLNYTKDYLDFLPLSDDENTKLNDTQKGSKVHVEAKSGMLTSALRHTWGFSAKDRNNHLHHAIDAVIIAYANNSIVKAFSDFKKEQESNSAELYAKKISELDYKNKRKFFEPFSGFRQKVLDKIDEIFVSKPERKKPSGALHEETFRKEEEFYQSYGGKEGVLKALELGKIRKVNGKIVKNGDMFRVDIFKHKKTNKFYAVPIYTMDFALKVLPNKAVARSKKGEIKDWILMDENYEFCFSLYKDSLILIQTKDMQEPEFVYYNAFTSSTVSLIVSKHDNKFETLSKNQKILFKNANEKEVIAKSIGIQNLKVFEKYIVSALGEVTKAEFRQREDFKK

SEQ ID NO: 860 - protein, 987 aa, Campylobacter coli
MARILAFDIGISSIGWAFSENDELKDCGVRIFTKAENPKTGESLALPRRLARSARKRLARRKARLNHLKHLIANEFKLNYEDYQSFDESLAKAYKGSLISPYELRFRALNELLSKQDFARVILHIAKRRGYDDIKNNGDEEKSEILKAIKQNEEKLVNYQSVGEYLYKEYFQKFKENSKEFINVRNKKESYERCIAQSFLKDELKLIFQKQREFGFSFSKKFEEEVLSVAFYKRALKDFSHLVGNCSFFTDEKRAPKNSPLAFMFVALTRIINLLNNLKNTEGILYTKDDLNTLLNEVLKNGTLTYKQTKKLLGLSDDYEFKGEKGTYFIEFKKYKEFIKALGEHNLSQDNLNEIAKDITLIKDEIKLKKALAKYDLNQNQIDSLSKLEFKDHLNISFKALKLITPLMLEGKKYDEAYNELNLKVAINEDKKDFLPAFNETYYKDEVTNPVVLRAIKEYRKVLNALLKKYGKVHKINIELAREVGKNHSQRAKIEKEQNENYKAKKDAELECEKLGLKINSKNILKLRLFKEQKEFCAYSGEKIKISDLQDEKMLEIDHIYPYSRSFDDSYMNKVLVFTKQNQEKLNQTPFEAFGNDSAKWQKIEVLAKNLPTKKQKRILDKNYKDKEQKDFKDRNLNDTRYIARLVLNYTKDYLDFLPLSDDENTKLNDTQKGSKVHVEAKSGMLTSALRHTWGFSAKDRNNHLHHAIDAVIIAYANNSIVKAFSDFKKEQESNSAELYAKKISELDYKNKRKFFEPFSGFRQKVLDKIDEIFVSKPERKKPSGALHEETFRKEEEFYQSYGGKEGVLKALELGKIRKVNGKIVKNGDMFRVDIFKHKKTNKFYAVPIYTMDFALKVLPNKAVARSKKGEIKDWILMDENYEFCFSLYKDSLILIQTKDMQEPELVYFNAFTSSTVSLIVSKHDNKFETLSKNQKILFKNANEKEVIAKSIGIQNLKVFEKYIVSALGEVTKAEFRQREDFKNELR

SEQ ID NO: 861 - protein, 984 aa, Campylobacter coli
MARILAFDIGISSIGWAFSENDELKDCGVRIFTKAENPKTGESLALPRRLARSARKRLARRKARLNHLKHLIANEFKLNYEDYQSFDESLAKAYKGSLISPYELRFRALNELLSKQDFARVILHIAKRRGYDDIKNNGDEEKSEILKAIKQNEEKLVNYQSVGEYLYKEYFQKFKENSKEFINVRNKKESYERCIAQSFLKDELKLIFQKQREFGFSFSKKFEEEVLSVAFYKRALKDFSHLVGNCSFFTDEKRAPKNSPLAFMFVALTRIINLLNNLKNTEGILYTKDDLNTLLNEVLKNGTLTYKQTKKLLGLSDDYEFKGEKGTYFIEFKKYKEFIKALGEHNLSQDNLNEIAKDITLIKDEIKLKKALAKYDLNQNQIDSLSKLEFKDHLNISFKALKLITPLMLEGKKYDEAYNELNLKVAINEDKKDFLPAFNETYYKDEVTNPVVLRAIKEYRKVLNALLKKYGKVHKINIELAREVGKNHSQRAKIEKEQNENYKAKKDAELECEKLGLKINSKNILKLRLFKEQKEFCAYSGEKIKISDLQDEKMLEIDHIYPYSRSFDDSYMNKVLVFTKQNQEKLNQTPFEAFGNDSAKWQKIEVLAKNLPTKKQKRILDKNYKDKEQKDFKDRNLNDTRYIARLVLNYTKDYLDFLPLSNDENTKLNDTQKGSKVHVEAKSGMLTSALRHTWGFSAKDRNNHLHHAIDAVIIAYANNSIVKAFSDFKKEQESNSAELYAKKISELDYKNKRKFFEPFSGFRQKVLDKIDEIFVSKPERKKPSGALHEETFRKEEEFYQSYGGKEGVLKALELGKIRKVNGKIVKNGDMFRVDIFKHKKTNKFYAVPIYTMDFALKVLPNKAVARSKKGEIKDWILMDENYEFCFSLYKDSLILIQTKDMQEPELVYFNAFTSSTVSLIVSKHDNKFETLSKNQKILFKNANEKEVIAKSIGIQNLKVFEKYIVSALGEVTKAEFRQREDFKK

SEQ ID NO: 862 - protein, 987 aa, Campylobacter coli
MARILAFDIGISSIGWAFSENDELKDCGVRIFTKAENPKTGESLALPRRLARSARKRLARRKARLNHLKHLIANEFKLNYEDYQSFDESLAKAYKGSLISPYELRFRALNELLSKQDFARVILHIAKRRGYDDIKNSDDKEKGAILKAIKQNEEKLANYQSVGEYLYKEYFQKFKENSKEFTNVRNKKESYERCIAQSFLKDELKLIFKKQREFGFSFSKKFEEEVLSVAFYKRALKDFSHLVGNCSFFTDEKRAPKNSPLAFMFVALTRIINLLNNLKNTEGILYTKDDLNALLNEVLKNGTLTYKQTKKLLGLSDDYEFKGEKGTYFIEFKKYKEFIKALGDHSLSQDDLNEIAKDITLIKDEIKLKKALAKYDLNQNQIDSLSKLEFKDHLNISFKALKLITPLMLEGKKYDEACNELNLKVAINEDKKDFLPAFNETYYKDEVTNPVVLRAIKEYRKVLNALLKKYGKVHKINIELAREVGKNYSQRAKIEKEQNENYKAKKDAELECEKLGLKINSKNILKLRLFKEQKEFCAYSGEKIKISDLQDEKMLEIDHIYPYSRSFDDSYMNKVLVFTKQNQEKLNKTPFEAFGNDSTKWQKIEVLAKNLPEKKQKRILDKNYKDKEQKDFKDRNLNDTRYIARLVLNYTKDYLDFLPLSDDENTKLNDTQKGSKVHVEAKSGMLTSALRHTWGFSTKDRNNHLHHAIDAVIIAYANNSIVKAFSDFKKEQESNSAELYAKKISELDYKNKRKFFEPFSGFRQKVLDKIDEIFVSKPERKKPSGALHEETFRKEEEFYQSYGGKEGVLKALELGKIRKVNGKIVKNGDMFRVDIFKHKKTNKFYAVPIYTMDFALKVLPNKAVARSKKGEIKDWILMDENYEFCFSLYKDSLILIQTKDMQEPEFVYYNAFTSSTVSLIVSKHDNKFETLSKNQKILFKNANEKEVIAKSIGIQNLKVFEKYIVSALGEVTKAEFRQREDFKNELR

SEQ ID NO: 863 - protein, 984 aa, Campylobacter coli
MARILAFDIGISSIGWAFSENDELKDCGVRIFTKAENPKTGESLALPRRLARSARKRLARRKARLNHLKHLIANEFKLNYEDYQSFDESLAKAYKGSLISPYELRFRALNELLSKQDFARVILHIAKRRGYDDIKNSDDKEKGAILKAIKQNEEKLTNYQSVGEYLYKEYFQKFKENSKEFTNVRNKKESYERCIAQSFLKDELKLIFKKQREFGFSFSKKFEEEVLSVAFYKRALKDFSHLVGNCSFFTDEKRAPKNSPLAFMFVALTRIINLLNNLKNTEGILYTKDDLNALLNEVLKNGTLTYKQTKKLLGLSDDYEFKGEKGTYFIEFKKYKEFIKALGDHSLSQDDLNEIAKDITLIKDEIKLKKALAKYDLNQNQIDSLSKLEFKDHLNISFKALKLITPLMLEGKKYDEACNELNLKVAINEDKKDFLPAFNETYYKDEVTNPVVLRAIKEYRKVLNALLKKYGKVHKINIELAREVGKNYSQRAKIEKEQNENYKAKKDAELECEKLGLKINSKNILKLRLFKEQKEFCAYSGEKIKISDLQDEKMLEIDHIYPYSRSFDDSYMNKVLVFTKQNQEKLNQTPFEAFGNDSAKWQKIEVLAKNLPTKKQKRILDKNYKDKEQKDFKDRNLNDTRYIARLVLNYTKDYLDFLPLSDDENTKLNDTQKGSKVHVEAKSGMLTSALRHTWGFSAKDRNNHLHHAIDAVIIAYANNSIVKAFSDFKKEQESNSAELYAKKISELDYKNKRKFFEPFSGFRQKVLDKIDEIFVSKPERKKPSGALHEETFRKEEEFYQSYGGKEGVLKALELGKIRKVNGKIVKNGDMFRVDIFKHKKTNKFYAVPIYTMDFALKVLPNKAVARSKKGEIKDWILMDENYEFCFSLYKDSLILIQTKDMQEPEFVYYNAFTSSTVSLIVSKHDNKFETLSKNQKILFKNANEKEVIAKSIGIQNLKVFEKYIVSALGEVTKAEFRQREDFKK

SEQ ID NO: 864 - protein, 965 aa, Campylobacter coli
MKIIGFNLGIANIGWALRENDEIIDCGVRVFDIPENPKNGNSLALERRENKARMKIVKRKKARMLATKTFLKKELNVDLSKLFLIGSTQSIYELRTKALSSLISKEELSAIILHIAKHRGYDDSALKNENGTIIEALNKNKEAMLKFKSVGEYFYKNFVQNKEVKKIRNTTEDYSNSVPRSLLKQELDLILDKQKELGLIKNADFKAKLFEIIFFKRPLKDFSNKIGNCIFFENEKRAAKNTISACEFVALGKVVNLLKSIEKDIGIVYEKDSINEIMSIILDKTSISYKKIRDILNLPQDINFKGLDYSKNNVENSKLVDLKKLNEFKKALGDGFTNLDKDILDSIATDITLTKDTATLKEKLKNYNVLNAEQIEKLSELVFNDHINLSLKALKQIIPLMYEGKRYDEACELCNFTIAKNQEKNEYLPLFEKTRFAKDISSPVVIRAICEFRKLLNDIIRRYGSVHKIHLELTRDFGISFNDRKKIIKEIEQNEQSRIKALETIKELKLEETSKNIQIVRLFEDQKGICPYSGLKMDLKCLDELVIDYIRPYNRSLDDSYSNKVLTFKKLNDLKQGKTPFEAFGEDEKLWAEINERIKEYNGKKRFKIFDKFFKDKKPFDFTEQTLQDTRWLTKLVASYLNEYLSFLPISEDENTALGYGEKGSKQHVILSSGMITQMLRNFWYLGFKNHKDYKNNAMDAIIVAFTTNSIIFTFNNFKKELDLAKAEFYANKISESDYLLKRKFLPPFSGFKEQALEKVKNIFVSHSLKIKNKGTLHELTPLKIKELKNTYGDLDLAVKLGKIRKYNDKYYANAKGSLVRTDLFADKENKFHAVSIYKADFSTKKLPNKTPATTSNGETKEGIEMNENYNFCMSLYKNTPISVKIKGMKEPIICYYHGFNTSGSKITYKKHDNNYHNLSEDEMVVFRKNDKESIVVGKILEIKKYSISPSGELSLIENEERKWF

SEQ ID NO: 865 - protein, 965 aa, Campylobacter coli
MKIIGFNLGIANIGWALRENDEIIDCGVRVFDIPENPKNGNSLALERRENKARMKIVKRKKARMLATKTFLKKELNVDLSKLFLIGSTQSIYELRTKALSSLISKEELSAIILHIAKHRGYDDSALKNENGTIIEALNKNKEAMLKFKSVGEYFYKNFVQNKEVKKIRNTTEDYSNSVPRSLLKQELDLILDKQKELGLIKNADFKAKLFEIIFFKRPLKDFSNKIGNCIFFENEKRAAKNTISACEFVALGKVVNLLKSIEKDIGIVYEKDSINEIMSIILDKTSISYKKIRDILNLPQDINFKGLDYSKNNAENSKLVDLKKLNEFKKALGDGFANLDKDILDSIATDITLTKDTATLKEKLKNYNVLNAEQIEKLSELVFNDHINLSLKALKQIIPLMYEGKRYDEACELCNFTIAKNQEKNEYLPLFEKTRFAKDISSPVVIRAICEFRKLLNDIIRRYGSVHKIHLELTRDFGISFNDRKKIIKEIEQNEQSRIKALETIKELKLEETSKNIQIVRLFEDQKGICPYSGLKMDLKCLDELVIDYIRPYNRSLDDSYSNKVLTFKKLNDLKQGKTPFEAFGEDEKLWAEINERIKEYNGKKRFKIFDKFFKDKKPFDFTEQTLQDTRWLTKLVASYLNEYLSFLPISEDENTALGYGEKGSKQHVVLSSGMITQMLRNFWYLGFKNHKNYKNNAMDAIIVAFTTNSIIFAFNNFKKELDLAKAEFYANKISESDYLLKRKFLPPFSGFKEQALEKVKNIFVSHSLKIKNKGTLHELTPLKIKELKNTYGDLDLAVKLGKIRKYNDKYYANTKGSLVRTDLFVDKENKFHAVSIYKADFSTKKLPNKTPATTSNGETKEGIEMNENYNFCMSLYKNTPVSVKIKGMKEPIICYYHGFNTSGSKITYKKHDNNYHNLSEDEMVVFRKNDKESIVVGKILEIKKYSISPSGELSLIENEKRKWF

SEQ ID NO: 866 - protein, 965 aa, Campylobacter coli
MKIIGFNLGIANIGWALRENDEIIDCGVRVFDIPENPKNGNSLALERRENKARMKIVKRKKARMLATKTFLKKELNVDLSKLFLIGSTQSIYELRTKALSSLISKEELSAIILHIAKHRGYDDSALKNENGTIIEALNKNKEAMLKFKSVGEYFYKNFVQNKEVKKIRNTTEDYSNSVPRSLLKQELDLILDKQKELGLIKNADFKEKLFEIIFFKRPLKDFSNKIGNCIFFENEKRAAKNTISACEFVALGKVVNLLKSIEKDIGIVYEKDSINEIMSIILDKTSISYKKIRDILNLPQDINFKGLDYSKNNAENSKLVDLKKLNEFKKALGDGFANLDKDILDSIATDITLTKDTATLKEKLKNYNVLNAEQIEKLSELVFNDHINLSLKALKQIIPLMYEGKRYDEACELCNFTIAKNQEKNEYLPLFEKTRFAKDISSPVVIRAICEFRKLLNDIIRRYGSVHKIHLELTRDFGISFNDRKKIIKEIEQNEQSRIKALETIKELKLEETSKNIQIVRLFEDQKGICPYSGLKMDLKCLDELVIDYIRPYNRSLDDSYSNKILTFKKLNDLKQGKTPFEAFGEDEKLWAEINERIKEYNGKKRFKIFDKFFKDKKPFDFTEQTLQDTRWLTKLVASYLNEYLLFLPINEDENTALGYGEKGSKQHVVLSSGMITQMLRNFWYLGFKNHKDYKNNAMDAIIVAFTTNSIIFAFNNFKKELDLAKAEFYANKISESDYLLKRKFLPPFSGFKEQALEKVKNIFVSHSLKIKNKGTLHELTPLKIKELKNTYGDLDLAVKLGKIRKYNDKYYANAKGSLVRTDLFADKENKFHAVSIYKADFSTKKLPNKTPATTSNGETKEGIEMNENYNFCMSLYKNTPISVKIKGMKEPIICYYHGFNTSGSKITYKKHDNNYHNLSEDEMVVFRKNDKESIVVGKILEIKKYSISPSGELSLIENEERKWF

SEQ ID NO: 867 - protein, 933 aa, Campylobacter coli
MKIIGFNLGIANIGWALRENDEIIDCGVRVFDIPENPKNGNSLALERRENKARMKIVKRKKARMLATKTFLKKELNVDLSKLFLIGSTQSIYELRTKALSSLISKEELSVIILHIAKHRGYDDSALKNENGTIIEALNKNKETMLKFKSVGEYFYKNFVQNKEVKKIRNTTEDYSNSVPRSLLKQELDLILDRQKELGLIKNADFKAKLFEIIFFKRPLKDFSNKIGNCIFFENEKRAAKNTISACEFVALGKVVNLLKSIEKDIGIVYEKDSINEIMSIILDKTSISYKKIRDILNLPQDINFKGLDYSKNNVENSKLVDLKKLNEFKKALGDGFTNLDKDILDSIATDITLTKDTATLKEKLKNYNVLNAEQIEKLSELVFNDHINLSLKALKQIIPLMYEGKRYDEACELCNFTIAKNQEKNEYLPLFEKTRFAKDISSPVVIRAICEFRKLLNDIIRRYGSVHKIHLELTRDFGISFNDRKKIIKEIEQNEQSRIKALETIKELKLEETSKNIQIVRLFEDQKGICPYSGLKMDLKCLDELVIDYIRPYNRSLDDSYSNKVLTFKKLNDLKQGKTPFEAFGEDEKLWAEINERIKEYNGKKRFKIFDKFFKDKKPFDFTEQTLQDTRWLTKLVASYLNEHLSFLPISEDENTALGYGEKGSKQHVILSSGMITQMLRNFWYLGFKNHKDYKNNAMDAIIVAFTTNSIIFTFNNFKKELDLAKAEFYANKISESDYLLKRKFLPPFSGFKEQALEKVKNIFVSHSLKIKNKGTLHELTPLKIKELKNTYGDLDLAVKLGKIRKYNDKYYANANGSLVRSDLFIDKKNKFHAVPIYKADFSTKKLPNKTPATTSNGETKEGIEMNENYNFCMSLYKNTPISVKIKGMKESIICYYHGFNTSGSKITYKKHDNNYHNLSEDEMVVFRKNDKE

SEQ ID NO: 868 - protein, 666 aa, Campylobacter jejuni
KGEKGTYFIEFKKYKEFIKALDEHSLSQDDLNEIAKDITLIKDEIKLKKALAKYDLKENQIDSLSKLEFKDHLNISFKALKLITPLMLEGKKYDEACNELNLKVAINEDKKDFLPAFNETYYKDEVTNPVVLRAIKEYRKILNALLKKYGKVHKINIELAREVGKNHSQRAKIEKEQNENYKAKKDAELECEKLGLKINSKNILKLRLFKEQKEFCVYSGEKIKLSDLQDEKMLEIDHIYPYSRSFDDSYMNKVLVFAKQNQEKLNKTPFEAFGNDSTKWQKIEVLTKNLPTKKQKRILDKNYKDKEQKDFKDRNLNDTRYIARLVLNYTKDYLDFLPLSDDENTKLNDTQKGSKVHVEAKSGMLTSALRHTWGFSTKDRNNHLHHAIDAAIIAYANNSIVKAFSDFKKEQESNSAELYAKKISELDYKNKRKFFEPFSGFRQKVLDKIDEIFVSKPERKKPSGALHEETFRKEEEFYQSYGGKEGVLKALELGKIRKVNGKIVKNGDMFRVDIFKHKKTNKFYAVPIYTMDFALKVLPNKAVARSKKGEIKDWILMDEDYEFCFSLYKDSLILIQTKDMQEPELVYFNAFTSSTVSLIVSKHDNKFETLSKNQKILFKNANEKEVIAKSIGIQNLKVFEKYIVSALGEVTKAEFRQREDFKNELR

SEQ ID NO: 869 - protein, 190 aa, Campylobacter jejuni
MAFDIGISSIGWAFSENDELKDCGVRIFTKVENPKTGESLALPRRLARSARKRLARRKARLNHLKHLIANEFKLNYEDYQSFDESLAKAYKGSLISPYELRFRALNELLSKQDFARVILHIAKRRGYDDIKNSDDKEKGAILKAIKQNEEKLANYQSVGEYLYKEYFQKFKENSKEFTNVRNKKKVMNAA

SEQ ID NO: 870 - protein, 985 aa, Campylobacter jejuni
MAKILAFDIGISSIGWAFVENDELKDCGVRIFTKAENPKTGESLALPRRLARSARKRLARRKARLNHLKHLIANEFKLNYEDYQSFDESLAKAYKGTLISPYELRFKALNELLSKQDLARVILHIAKRRGYDNIKNSDDKEKGAILKAVKENEEKLANYKSVGEYLYKEYFQKFKENSKEFINVRNKKESYERCIAQSFLKDELKLIFQKQREFGFNFSKKFEEEVLSVAFYKRALKDFSHLVGNCSFFVDEKRAPKNSPLAFEFVALTRIVNLLNNLNKNNSYIKDDLNALLSEVLKNGTLTYKQTKKILGLSDDYEFKGQKGNYFIEFKKYKEFIKALCEHNLNQDDLNEIAKDITLVKDETKLKKALAKYDLNQNQIENLSKIEFKDHLNISFKALKLIVPLMREGKKYDEVCNELNLKTAINEDKKEFLPAFNETYYKDEVNNPVVLRAIKEYRKVLNSLLKKYGKVHKINIELAREVGKNHRERSKIEKEQNENFKAKKDAELECEKLGLKINSKNILKLRLFKEQKEFCVYSGEKIKISDLQDEKMLEIDHIYPYSRSFDDSYMNKVLVFTKQNQEKLNKTPFEAFGKDDVKWQKIETLAKNLPAKKQKRILDKNYKDKEQKDFKDRNLNDTRYIARLVLNYTKDYLEFLPLSDDENIKLNDTQKGSKVHVEAKSGMLTSVLRHTWGFSTKDRNNHLHHAIDAVIIAYANASVVKAFSDFKKEQENYTAELYAKKINELDFKNKRKFFEPFSNFRQKVLEKIDEIFVSKPERKKPSGALHEETFYKEEEFYKEYGGKEGVLKALELGKIRKVNGKIVSNANMFRVDIFKYKKTNKFYAVPIYTMDFALGILPNKAVVGGKDKQGIIKDWLLMDENYEFCFSLYKDSLILLQTKDMQEPELVYFKSFKSSTAGLVVSKHDNKFENLNENQKKLFKSANEKKVVAEGIGIQNLKVFEKYIVSALGEITKAEIKERENFKKK

SEQ ID NO: 871 - protein, 987 aa, Campylobacter jejuni
MARILAFDIGISSIGWAFSENDELKDCGVRIFTKAENPKTGESLALPRCLARSARKRLARRKARLNHLKHLIANEFKLNYEDYQSFDESLAKAYKGSLISPYELRFRALNELLSKQDFARVILHIAKRRGYDDIKNNGDEEKGEILKAIKQNEEKLVSYQSVGEYLYKEYFQKFKENSKEFINVRNKKESYERCIAQSFLKDELKLIFQKQRKFGFSFSKKFEEEVLSVAFYKRALKDFSHLVGNCSFFTDEKRAPKNSPLAFMFVALTRIINLLNNLKNTEGILYTKDDLNTLLNEVLKNGTLTYKQTKKLLGLSNDYEFKGEKGTYFIEFQKYKEFVKALGEHNLSQDDLNEIAKDITLIKDEIKLKKALAKYDLNQNQIDSLSKLEFKDHLNISFKALKLITPLMLEGKKYDEACNELNLKVAINEDKKDFLPAFNETYYKDEVTNPVVLRAIKEYRKVLNALLKKYGKVHKINIELAREVGKNHSQRAKIEKEQNENYKAKKDAELECEKLGLKINSKNILKLRLFKEQKEFCVYSGEKIKISDLQDEKMLEIDHIYPYSRSFDDSYMNKVLVFTKQNQEKLNKTPFETFGNDRVKWQKIEVLAKNLPTKKQKRILDKNYKDKEQKDFKDRNLNDTRYIARLVLNYTKDYLDFLPLSDDENTKLNDTQKGSKVHVEAKSGMLTSTLRHTWGFSTKDRNNHLHHAIDAAIIAYANNSIVKAFSDFKKEQESNTAELYAKKISELDYKNKRKFFEPFSGFRQKLLDKIDEIFVSKPERKKPSGALHEETFRKEEEFYQSYGGKEGVLKALELGKIRKVNGKIVSNGDMFRVDIFKHKKTNKFYAVPIYTMDFALKVLPNKAVVQGKDKKSGLIKDWILMDENYEFCFSLYKDSLILIQTKDMQEPELVYYERLDSSNASLTVSKHDNKFETLSKNQKILFKNANEKEVIAKSIGIQNLKVFEKYIVSALGEVTKAEFRQREDFKK

SEQ ID NO: 872 - protein, 987 aa, Campylobacter jejuni
MARILAFDIGISSIGWAFSENDELKDCGVRIFTKAENPKTGESLALPRRLARSARKRLARRKARLNHLKHLIANEFKLNYEDYQSFDEGLAKAYKGSLISPYELRFRALNELLSKQDFARVILHIAKRRGYDDIKNNGDEEKSEILKAIKQNEEKLVNYQSVGEYLYKEYFQKFKENSKEFINVRNKKESYERCIAQSFLKDELKLIFQKQREFGFSFSKKFEEEVLSVAFYKRALKDFSHLVGNCSFFTDEKRAPKNSPLAFMFVALTRIINLLNNLKNTEGILYTKDDLNTLLNEVLKNGTLTYKQTKKLLGLSDDYEFKGEKGTYFIEFKKYKEFIKALGEHNLSQDNLNEIAKDITLIKDEIKLKKALAKYDLNQNQIDSLSKLEFKDHLNISFKALKLITPLMLEGKKYDEAYNELNLKVAINEDKKDFLPAFNETYYKDEVTNPVVLRAIKEYRKVLNALLKKYGKVHKINIELAREVGKNHSQRAKIEKEQNENYKAKKDAELECEKLGLKINSKNILKLRLFKEQKEFCAYSGEKIKISDLQDEKMLEIDHIYPYSRSFDDSYMNKVLVFTKQNQEKLNQTPFEAFGNDSAKWQKIEVLAKNLPTKKQKRILDKNYKDKEQKDFKDRNLNDTRYIARLVLNYTKDYLDFLPLSDDENTKLNDTQKGSKVHVEAKSGMLTSALRHTWGFSAKDRNNHLHHAIDAVIIAYANNSIVKAFSDFKKEQESNSAELYAKKISELDYKNKRKFFEPFSGFRQKVLDKIDEIFVSKPERKKPSGALHEETFRKEEEFYQSYGGKEGVLKALELGKIRKVNGKIVKNGDMFRVDIFKHKKTNKFYAVPIYTMDFALKVLPNKAVVQGKDKKSGLIKDWILMDENYEFCFSLYKDSLILIQTKDMQEPELVYFNAFTSSTVSLIVSKHDNKFETLSKNQKILFKNANEKEVIAKSIGIQNLKVFEKYIVSALGEVTKAEFRQREDFKK

SEQ ID NO: 873 - protein, 961 aa, Campylobacter jejuni
MARILAFDIGISSIGWAFSENDELKDCGVRIFTKAENPKTGESLALPRRLARSARKRLARRKARLNHLKHLIANEFKLNYEDYQSFDESLAKAYKGSLISPYELRFRALNELLSKQDFARVILHIAKRRGYDDIKNNGDEEKGKILKAIKQNEEKLVNYQSVGEYLYKEYFQKFKENSKEFINVRNKKESYERCITQSFLKYELKLIFQKQREFGFSFSKKFEEEVLSVAFYKRALKDFSHLVGNCSFFSDEKRAPKNSPLAFMFVALTRIINLLNNLKNTEGILYTKDDLNALLNEVLKNGTLTYKQTKKLLGLSDDYEFKGEKGTYFIEFKKYKEFIKALGEHNLSQDDLNEIAKDITLIKDEIKLKKALAKYDLNQNQIDSLSKLEFKDHLNIGFKALKLITPLMLEGKKYDEACNELNLKVAINEDKKDFLPAFNETYYKDEVTNPVVLRAIKEYRKVLNALLKKYGKVHKINIELAREVGKNHSQRAKIEKEQNENYKAKKDAELECEKLGLKINSKNILKLRLFKEQKEFCAYSGEKIKLSDLQDEKMLEIDHIYPYSRSFDDSYMNKVLVFTKQNQEKLNKTPFEAFGNDNVKWQKIEVLAKNLPEKKQKRILDKNYKDKEQKDFKDRNLNDTRYIARLVLNYTKDYLDFLPLSDDENTKLKGSKVHVEAKSGMLTSALRHTWGFSTKDRNNHLHHAIDAAIIAYANNSIVKDFSDFKKEQESNSAELYAKKISELDYKNKRKFFEPFSGFRQKVLDKIDEIFVSKPERKKPSGALHEETFRKEEEFYQSYGGKEGVLKALELGKIRKVNGKIVKNGDMFRVDIFKHKKTNKFYAVPIYTMDFALKVLPNKAVARSKKGEIKDWILMDENYEFCFSLYKDSLILIQTKDMQEPELVYFNAFTSSTVSLIVSKHDNKFETLSKNLKVFEKYIVSALGEVTKAEFRQREDFKNELR

SEQ ID NO: 874 - protein, 984 aa, Campylobacter jejuni
MARILAFDIGISSIGWAFSENDELKDCGVRIFTKAENPKTGESLALPRRLARSARKRLARRKARLNHLKHLIANEFKLNYEDYQSFDESLAKAYKGSLISPYELRFRALNELLSKQDFARVILHIAKRRGYDDIKNNGDEEKGKILKAIKQNEEKLVNYQSVGEYLYKEYFQKFKENSKEFINVRNKKESYERCITQSFLKYELKLIFQKQREFGFSFSKKFEEEVLSVAFYKRALKDFSHLVGNCSFFTDEKRAPKNSPLAFMFVALTRIINILNNLKNTEGILYTKDDLNALLNEVLKNGTLTYKQTKKLLGLSDDYEFKGEKGTYFIEFKKYKEFIKALGEHNLSQDDLNEIAKDITLIKDEIKLKKALAKYDLNQNQIDSLSKLEFKDHLNISFKALKLITPLMLEGKKYDEACNELNLKVAINEDKKDFLPAFNETYYKDEVTNPVVLRAIKEYRKILNALLKKYGKVHKINIELAREVGKNHSQRAKIEKEQNENYKAKKDAEIECEKLGLKINSKNILKLRLFKEQKEFCAYSGEKIKISDLQDEKMLEIDHIYPYSRSFDDSYMNKVLVFTKQNQEKLNQTPFEAFGNDSAKWQKIEVLAKNLPTKKQKRILDKNYKDKEQKDFKDRNLNDTRYIARLVLNYTKDYLDFLPLSDDENTKLNDTQKGSKVHVEAKSGMLTSALRHTWGFSAKDRNNHLHHAIDAVIIAYANNSIVKAFSDFKKEQESNSAELYAKKISELDYKNKRKFFEPFSGFRQKVLDKIDEIFVSKPERKKPSGALHEETFRKEEEFYQSYGGKEGVLKALELGKIRKVNGKIVKNGDMFRVDIFKHKKTNKFYAVPIYTMDFALKVLPNKAVARSKKGEIKDWILMDENYEFCFSLYKDSLILIQTKDMQEPEFVYYNAFTSSTVSLIVSKHDNKFETLSKNQKILFKNANEKEVIAKSIGIQNLKVFEKYIVSALGEVTKAEFRQREDFKK

SEQ ID NO: 875 - protein, 987 aa, Campylobacter jejuni
MARILAFDIGISSIGWAFSENDELKDCGVRIFTKAENPKTGESLALPRRLARSARKRLARRKARLNHLKHLIANEFKLNYEDYQSFDESLAKAYKGSLISPYELRFRALNELLSKQDFARVILHIAKRRGYDDIKNNGDEEKGKILKAIKQNEEKLVSYQSVGEYLYKEYFQKFKENSKEFINVRNKKESYERCIAQSFLKDELKLIFQKQREFGFSFSKKFEEEVLSVAFYKRALKDFSHLVGNCSFLLMKKERQKNSPLAFMFVALTRIINLLNNLKNTEGILYTKDDLNTLLNEALKNGTLTYKQTKKLLGLSNDYEFKGEKGTYFIEFQKYKEFVKALGEHNLSQDDLNEIAKDITLIKDEIKLKKALAKYDLNQNQIDSLSKLEFKDHLNISFKALKLITPLMLEGKKYDEACNELNLKVAINEDKKDFLPAFNETYYKDEVTNPVVLRAIKEYRKVLNALLKKYGKVHKINIELAREVGKNHSQRAKIEKEQNENYKAKKDAELECEKLGLKINSKNILKLRLFKEQKEFCVYSGEKIKISDLQDEKMLEIDHIYPYSRSFDDSYMNKVLVFTKQNQEKLNKTPFETFGNDRVKWQKIEVLAKNLPTKKQKRILDKNYKDKEQKDFKDRNLNDTRYIARLVLNYTKDYLDFLPLSDDENTKLNDTQKGSKVHVEAKSGMLTSTLRHTWGFSTKDRNNHLHHAIDAAIIAYANNSIVKAFSDFKKEQESNTAELYAKKISELDYKNKRKFFEPFSGFRQKLLDKIDEIFVSKPERKKPSGALHEETFRKEEEFYQSYGGKEGVLKALELGKIRKVNGKMVKNGDMFRVDIFKHKKTNKFYAVPIYTMDFALKVLPNKAVVQGKDKKSGLIKDWILMDENYEFCFSLYKDSLILIQTKDMQEPELVYYERLDSSNASLTVSKHDNKFETLSKNQKILFKNANEKEVIAKSIGIQNLKVFEKYIVSALGEVTKAEFRQREDFKK

SEQ ID NO: 876 - protein, 987 aa, Campylobacter jejuni
MARILAFDIGISSIGWAFSENDELKDCGVRIFTKAENPKTGESLALPRRLARSARKRLARRKARLNHLKHLIANEFKLNYEDYQSFDESLAKAYKGSLISPYELRFRALNELLSKQDFARVILHIAKRRGYDDIKNNGDEEKSEILKAIKQNEEKLVNYQSVGEYLYKEYFQKFKENSKEFINVRNKKESYERCIAQSFLKDELKLIFQKQREFGFSFSKKFEEEVLSVAFYKRALKDFSHLVGNCSFFTDEKRAPKNSPLAFMFVALTRIINLLNNLKNTEGILYTKDDLNTLLNEVLKNGTLTYKQTKKLLGLSDDYEFKGEKGTYFIEFKKYKEFIKALGEHNLSQDNLNEIAKDITLIKDEIKLKKALAKYDLNQNQIDSLSKLEFKDHLNISFKALKLITPLMLEGKKYDEAYNELNLKVAINEDKKDFLPAFNETYYKDEVTNPVVLRAIKEYRKVLNALLKKYGKVHKINIELAREVGKNHSQRAKIEKEQNENYKAKKDAELECEKLGLKINSKNILKLRLFKEQKEFCAYSGEKIKISDLQDEKMLEIDHIYPYSRSFDDSYMNKVLVFTKQNQEKLNQTPFEAFGNDSAKWQKIEVLAKNLPTKKQKRILDKNYKDKEQKDFKDRNLNDTRYIARLVLNYTKDYLDFLPLSDDENTKLNDTQKGSKVHVEAKSGMLTSALRHTWGFSAKDRNNHLHHAIDAVIIAYANNSIVKAFSDFKKEQESNSAELYAKKISELDYKNKRKFFEPFSGFRQKVLDKIDEIFVSKPERKKPSGALHEETFRKEEEFYQSYGGKEGVLKALELGKIRKVNGKIVKNGDMFRVDIFKHKKTNKFYPVPIYTMDFALKVLPNKAVVQGKDKKSGLIKDWILMDENYEFCFSLYKDSLILIQTKDMQEPELVYFNAFTSSTVSLIVSKHDNKFETLSKNQKILFKNANEKEVIAKSIGIQNLKVFEKYIVSALGEVTKAEFRQREDFKK

SEQ ID NO: 877 - protein, 987 aa, Campylobacter jejuni
MARILAFDIGISSIGWAFSENDELKDCGVRIFTKAENPKTGESLALPRRLARSARKRLARRKARLNHLKHLIANEFKLNYEDYQSFDESLAKAYKGSLISPYELRFRALNELLSKQDFARVILHIAKRRGYDDIKNNGDEEKSEILKAIKQNEEKLVNYQSVGEYLYKEYFQKFKENSKEFINVRNKKESYERCIAQSFLKDELKLIFQKQREFGFSFSKKFEEEVLSVAFYKRALKDFSHLVGNCSFFTDEKRAPKNSPLAFMFVALTRIINLLNNLKNTEGILYTKDDLNTLLNEVLKNGTLTYKQTKKLLGLSDDYEFKGEKGTYFIEFKKYKEFIKALGEHNLSQDNLNEIAKDITLIKDEIKLKKALAKYDLNQNQIDSLSKLEFKDHLNISFKALKLITPLMLEGKKYDEAYNELNLKVAINEDKKDFLPAFNETYYKDEVTNPVVLRAIKEYRKVLNALLKKYGKVHKINIELAREVGKNHSQRAKIEKEQNENYKAKKDAELECEKLGLKINSKNILKLRLFKEQKEFCAYSGEKIKISDLQDEKMLEIDHIYPYSRSFDDSYMNKVLVFTKQNQEKLNQTPFEAFGNDSAKWQKIEVLAKNLPTKKQKRILDKNYKDKEQKDFKDRNLNDTRYIARLVLNYTKDYLDFLPLSDDENTKLNDTQKGSKVHVEAKSGMLTSALRHTWGFSAKDRNNHLHHAIDAVIIAYANNSIVKAFSDFKKEQESNSAELYAKKISELDYKNKRKFFEPFSGFRQKVLDKIDEIFVSKPERKKPSGALHEETFRKEEEFHQSYGGKEGVLKALELGKIRKVNGKIVKNGDMFRVDIFKHKKTNKFYAVPIYTMDFALKVLPNKAVVQGKDKKSGLIKDWILMDENYEFCFSLYKDSLILIQTKDMQEPELVYFNAFTSSTVSLIVSKHDNKFETLSKNQKILFKNANEKEVIAKSIGIQNLKVFEKYIVSALGEVTKAEFRQREDFKK

SEQ ID NO: 878 - protein, 987 aa, Campylobacter jejuni
MARILAFDIGISSIGWAFSENDELKDCGVRIFTKAENPKTGESLALPRRLARSARKRLARRKARLNHLKHLIANEFKLNYEDYQSFDESLAKAYKGSLISPYELRFRALNELLSKQDFARVILHIAKRRGYDDIKNNGDEEKSEILKAIKQNEEKLVNYQSVGEYLYKEYFQKFKENSKEFINVRNKKESYERCIAQSFLKDELKLIFQKQREFGFSFSKKFEEEVLSVAFYKRALKDFSHLVGNCSFFTDEKRAPKNSPLAFMFVALTRIINLLNNLKNTEGILYTKDDLNTLLNEVLKNGTLTYKQTKKLLGLSDDYEFKGEKGTYFIEFKKYKEFIKALGEHNLSQDNLNEIAKDITLIKDEIKLKKALAKYDLNQNQIDSLSKLEFKDHLNISFKALKLITPLMLEGKKYDEAYNELNLKVAINEDKKDFLPAFNETYYKDEVTNPVVLRAIKEYRKVLNALLKKYGKVHKINIELAREVGKNHSQRAKIEKEQNENYKAKKDAELECEKLGLKINSKNILKLRLFKEQKEFCAYSGEKIKISDLQDEKMLEIDHIYPYSRSFDDSYMNKVLVFTKQNQEKLNQTPFEAFGNDSAKWQKIEVLAKNLPTKKQKRILDKNYKDKEQKDFKDRNLNDTRYIARLVLNYTKDYLDFLPLSDDENTKLNDTQKGSKVHVEAKSGMLTSALRHTWGFSAKDRNNHLHHAIDAVIIAYANNSIVKAFSDFKKEQESNSAELYAKKISELDYKNKRKFFEPFSGFRQKVLDKIDEIFVSKPERKKPSGALHEETFRKEEEFYQSYGGKEGVLKALELGKIRKVNGKIVKNGDMFRVDIFKHKKTNKFYAVPIYTMDFALKVLPNKAVVQGKDKKSGLIKDWILMDENYEFCFSLYKDSLILIQTKDMQEPELVYFNAFTSSTVSLIVSKHDNKFETLSKNQKILFKNANEKEVIAKSIGIQNLKVFEKYIVSALGEVTKAEFRQREDFKK

SEQ ID NO: 879 - protein, 861 aa, Campylobacter jejuni
MARILAFDIGISSIGWAFSENDELKDCGVRIFTKAENPKTGESLALPRRLARSARKRLARRKARLNHLKHLIANEFKLNYEDYQSFDESLAKAYKGSLISPYELRFRALNELLSKQDFARVILHIAKRRGYDDIKNNGDEEKSEILKAIKQNEEKLVNYQSVGEYLYKEYFQKFKENSKEFINVRNKKESYERCITQSFLKDELKLIFQKQREFGFSFSKKFEEEVLSVAFYKRALKDFSHLVGNCSFFTDEKRAPKNSPLAFMFVALTRIINILNNLKNTEGILYTKDDLNALLNEVLKNGTLTYKQTKKLLGLSDDYEFKGEKGTYFIEFKKYKEFIKALGEHNLSQDDLNEIAKDITLIKDEIKLKKALAKYDLNQNQIDSLSKLEFKDHLNISFKALKLITPLMLEGKKYDEACNELNLKVAINEDKKDFLPAFNETYYKDEVTNPVVLRAIKEYRKILNALLKKYGKVHKINIELAREVGKNHSQRAKIEKEQNENYKAKKDAEIECEKLGLKINSKNILKLRLFKEQKEFCAYSGEKIKLSDLQDEKMLEIDHIYPYSRSFDDSYMNKVLVFTKQNQEKLNKTPFEAFGNDSTKWQKIEVLAKNLPEKKQKRILDKNYKDKEQKDFKDRNLNDTRYIARLVLNYTKDYLDFLPLSDDENTKLNDTQKGSKVHVEAKSGMLTSALRHTWGFSAKDRNNHLHHAIDAAIIAYANNSIVKAFSDFKKEQESNSVELYAKKISELDYKNKRKFFEPFSGFRQKVLDKIDEIFVSKPERKKPSGALHEETFRKEEEFYQSYGGKEGVLKALELGKIRKVNGKIVKNGDMFRVDIFKHKKTNKFLCCANLYYGFCFKSITK

SEQ ID NO: 880 - protein, 462 aa, Campylobacter jejuni
MARILAFDIGISSIGWAFSENDELKDCGVRIFTKAENPKTGESLALPRRLARSARKRLARRKARLNHLKHLIANEFKLNYEDYQSFDESLAKAYKGSLISPYELRFRALNELLSKQDFARVILHIAKRRGYDDIKNNGDEEKSEILKAIKQNEEKLVNYQSVGEYLYKEYFQKFKENSKEFINVRNKKESYERCITQSFLKDELKLIFQKQREFGFSFSKKFEEEVLSVAFYKRALKDFSHLVGNCSFFTDEKRAPKNSPLAFMFVALTRIINILNNLKNTEGILYTKDDLNALLNEVLKNGTLTYKQTKKLLGLSDDYEFKGEKGTYFIEFKKYKEFIKALGEHNLSQDDLNEIAKDITLIKDEIKLKKALAKYDLNQNQIDSLSKLEFKDHLNISFKALKLITPLMLEGKKYDEACNELNLKVAINEDKKDFLPAFNETYYKDEVTNPVVLRAIKEYRKS

SEQ ID NO: 881 - protein, 984 aa, Campylobacter jejuni
MARILAFDIGISSIGWAFSENDELKDCGVRIFTKAENPKTGESLALPRRLARSARKRLARRKARLNHLKHLIANEFKLNYEDYQSFDESLAKAYKGSLISPYELRFRALNELLSKQDFARVILHIAKRRGYDDIKNNGDEEKSEILKAIKQNEEKLVNYQSVGEYLYKEYFQKFKENSKEFINVRNKKESYERCITQSFLKDELKLIFQKQREFGFSFSKKFEEEVLSVAFYKRALKDFSHLVGNCSFFTDEKRAPKNSPLAFMFVALTRIINLLNNLKNTEGILYTKDDLNALLNEVLKNGTLTYKQTKKLLGLSDDYEFKGEKGTYFIEFKKYKEFIKALDEHSLSQDDLNEIAKDITLIKDEIKLKKALAKYDLNQNQIDSLSKLEFKDHLNISFKALKLITPLMLEGKKYDEACNELNLKVAINEDKKDFLPAFNETYYKDEVTNPVVLRAIKEYRKILNALLKKYGKVHKINIELAREVGKNHSQRAKIEKEQNENYKAKKDAEIECEKLGLKINSKNILKLRLFKEQKEFCAYSGEKIKISDLQDEKMLEIDHIYPYSRSFDDSYMNKVLVFTKQNQEKLNKTPFEAFGNDGVKWQKIEVLAKNLPEKKQKRILDKNYKDKEQKDFKDRNLNDTRYIARLVLNYTKDYLDFLPLSDDENTKLNDTQKGSKVHVEAKSGMLTSALRHTWGFSTKDRNNHLHHAIDAAIIAYANNSIVKAFSDFKKEQESNSAELYAKKISELDYKNKRKFFEPFSGFRQKVLDKIDEIFVSKPERKKPSGALHEETFRKEEEFYQSYGGKEGVLKALELGKIRKVNGKIVKNGDMFRVDIFKHKKTNKFYAVPIYTMDFALKVLPNKAVARSKKGEIKDWILMDENYEFCFSLYKDSLILIQTKDMQEPELVYFNAFTSSTVSLVVSKHDNKFETLSKNQKILFKNANEKEVIAKSIGIQNLKVFEKYIVSALGEVTKAEFRQREDFKK

SEQ ID NO: 882 - protein, 984 aa, Campylobacter jejuni
MARILAFDIGISSIGWAFSENDELKDCGVRIFTKAENPKTGESLALPRRLARSARKRLARRKARLNHLKHLIANEFKLNYEDYQSFDESLAKAYKGSLISPYELRFRALNELLSKQDFARVILHIAKRRGYDDIKNSDDKEKGAILKAIKQNEEKLANYQSVGEYLYKEYFQKFKENSKEFTNVRNKKESYERCIAQSFLKDELKLIFKKQREFGFSFSKKFEEEVLSVAFYKRALKDFSHLVGNCSFFTDEKRAPKNSPLAFMFVALTRIINLLNNLKNTEGILYTKDDLNALLNEVLKNGTLTYKQTKKLLGLSDDYEFKGEKGTYFIEFKKYKEFIKALGDHSLSQDDLNEIAKDITLIKDEIKLKKALAKYDLNQNQIDSLSKLEFKDHLNISFKALKLITPLMLEGKKYDEACNELNLKVAINEDKKDFLPAFNETYYKDEVTNPVVLRAIKEYRKVLNALLKKYGKVHKINIELAREVGKNYSQRAKIEKEQNENYKAKKDAELECEKLGLKINSKNILKLRLFKEQKEFCAYSGEKIKISDLQDEKMLEIDHIYPYSRSFDDSYMNKVLVFTKQNQEKLNQTPFEAFGNDSAKWQKIEVLAKNLPTKKQKRILDKNYKDKEQKDFKDRNLNDTRYIARLVLNYTKDYLDFLPLSDDENTKLNDTQKGSKVHVEAKSGMLTSALRHTWGFSAKDRNNHLHHAIDAVIIAYANNSIVKAFSDFKKEQESNSAELYAKKISELDYKNKRKFFEPFSGFRQKVLDKIDEIFVSKPERKKPSGALHEETFRKEEEFYQSYGGKEGVLKALELGKIRKVNGKIVKNGDMFRVDIFKHKKTNKFYAVPIYTMDFALKVLPNKAVARSKKGEIKDWILMDENYEFCFSLYKDSLILIQTKDMQEPEFVYYNAFTSSTVSLIVSKHDNKFETLSKNQKILFKNANEKEVIAKSIGIQNLKVFEKYIVSALGEVTKAEFRQREDFKK

SEQ ID NO: 883 - protein, 984 aa, Campylobacter jejuni
MARILAFDIGISSIGWAFSENDELKDCGVRIFTKAENPKTGESLALPRRLARSARKRLARRKARLNHLKHLIANEFKLNYEDYQSFDESLAKAYKGSLISPYELRFRALNELLSKQDFARVILHIAKRRGYDDIKNSDDKEKGAILKAIKQNEEKLANYQSVGEYLYKEYFQKFKENSKEFTNVRNKKESYERCIAQSFLKDELKLIFKKQREFGFSFSKKFEEEVLSVAFYKRALKDFSHLVGNCSFFTDEKRAPKNSPLAFMFVALTRIINLLNNLKNTEGILYTKDDLNTLLNEVLKNGTLTYKQTKKLLGLSDDYEFKGEKGTYFIEFKKYKEFIKALGEHNLSQDDLNEIAKDITLIKDEIKLKKALAKYDLNQNQIDSLSKLEFKDHLNISFKALKLITPLMLEGKKYDEACNELNLKVAINEDKKDFLPAFNETYYKDEVTNPVVLRAIKEYRKVLNALLKKYGKVHKINIELAREVGKNYSQRAKIEKEQNENYKAKKDAELECEKLGLKINSKNILKLRLFKEQKEFCAYSGEKIKISDLQDEKMLEIDHIYPYSRSFDDSYMNKVLVFTKQNQEKLNKTPFEAFGNDSTKWQKIEVLAKNLPEKKQKRILDKNYKDKEQKDFKDRNLNDTRYIARLVLNYTKDYLDFLPLSDDENTKLNDTQKGLKVHVEAKSGMLTSALRHTWGFSAKDRNNHLHHAIDAVIIAYANNSIVKAFSDFKKEQESNSAELYAKKISELDYKNKRKFFEPFSGFRQKVLDKIDEIFVSKPERKKPSGALHEETFRKEEEFYQSYGGKEGVLKALELGKIRKVNGKIVKNGDMFRVDIFKHKKTNKFYAVPIYTMDFALKVLPNKAVARSKKGEIKDWILMDENYEFCFSLYKDSLILIQTKDMQEPEFVYYNAFTSSTVSLIVSKHDNKFETLSKNQKILFKNANEKEVIAKSIGIQNLKVFEKYIVSALGEVTKAEFRQREDFKK

SEQ ID NO: 884 - protein, 984 aa, Campylobacter jejuni
MARILAFDIGISSIGWAFSENDELKDCGVRIFTKAENPKTGESLALPRRLARSARKRLARRKARLNHLKHLIANEFKLNYEDYQSFDESLAKAYKGSLISPYELRFRALNELLSKQDFARVILHIAKRRGYDDIKNSDDKEKGAILKAIKQNEEKLANYQSVGEYLYKEYFQKFKENSKEFTNVRNKKESYERCIAQSFLKDELKLIFKKQREFGFSFSKKFEEEVLSVAFYKRALKDFSHLVGNCSFFTDEKRAPKNSPLAFMFVALTRIINLLNNLKNTEGILYTKDDLNALLNEVLKNGTLTYKQTKKLLGLSDDYEFKGEKGTYFIEFKKYKEFIKALGDHSLSQDDLNEIAKDITLIKDEIKLKKALAKYDLNQNQIDSLSKLEFKDHLNISFKALKLITPLMLEGKKYDEACNELNLKVAINEDKKDFLPAFNETYYKDEVTNPVVLRAIKEYRKVLNALLKKYGKVHKINIELAREVGKNYSQRAKIEKEQNENYKAKKDAELECEKLGLKINSKNILKLRLFKEQKEFCAYSGEKIKISDLQDEKMLEIDHIYPYSRSFDDSYMNKVLVFTKQNQEKLNQTPFEAFGNDSAKWQKIEVLAKNLPTKKQKRILDKNYKDKEQKNFKDRNLNDTRYIARLVLNYTKDYLDFLPLSDDENTKLNDTQKGSKVHVEAKSGMLTSALRHTWGFSAKDRNNHLHHTIDAVIIAYANNSIVKAFSDFKKEQESNSAELYAKKISELDYKNKRKFFEPFSGFRQKVLDKIDEIFVSKPERKKPSGALHEETFRKEEEFYQSYGGKEGVLKALELGKIRKVNGKIVKNGDMFRVDIFKHKKTNKFYAVPIYTMDFALKVLPNKAVARSKKGEIKDWILMDENYEFCFSLYKDSLILIQTKDMQEPEFVYYNAFTSSTVSLIVSKHDNKFETLSKNQKILFKNANEKEVIAKSIGIQNLKVFEKYIVSALGEVTKAEFRQREDFKK

SEQ ID NO: 885 - protein, 984 aa, Campylobacter jejuni
MARILAFDIGISSIGWAFSENDELKDCGVRIFTKAENPKTGESLALPRRLARSARKRLARRKARLNHLKHLIANEFKLNYEDYQSFDESLAKAYKGSLISPYELRFRALNELLSKQDFARVILHIAKRRGYDDIKNSDDKEKGAILKAIKQNEEKLANYQSVGEYLYKEYFQKFKENSKEFTNVRNKKESYERCIAQSFLKDELKLIFKKQREFGFSFSKKFEEEVLSVAFYKRALKDFSHLVGNCSFFTDEKRAPKNSPLAFMFVALTRIINLLNNLKNTEGILYTKDDLNTFLNEVLKNGTLTYKQTKKLLGLSDDYEFKGEKGTYFIEFKKYKEFIKALGDHNLSQDDLNEIAKDITLIKDEIKLKKALAKYDLNQNQIDSLSKLEFKDHLNISFKALKLITPLMLEGKKYDEACNELNLKVAINEDKKDFLPAFNETYYKDEVTNPVVLRAIKEYRKVLNALLKKYGKVHKINIELAREVGKNHSQRAKIEKEQNENYKAKKDAELECEKLGLKINSKNILKLRLFKEQKEFCAYSGEKIKISDLQDEKMLEIDHIYPYSRSFDDSYMNKVLVFTKQNQEKLNKTPFEAFGNDSAKWQKIEVLAKNLPTKKQKRILDKNYKDKEQKDFKDRNLNDTRYIARLVLNYTKDYLDFLPLSDDENTKLNDTQKGSKVHVEAKSGMLTSALRHTWGFSTKDRNNHLHHAIDAVIIAYANNSIVKAFSDFKKEQESNSAELYAKKISELDYKNKRKFFEPFSGFRQKVLDKIDEIFVSKPERKKPSGALHEETFRKEEEFYQSYGGKEGVLKALELGKIRKVNGKIVKNGDMFRVDIFKHKKTNKFYAVPIYTMDFALKVLPNKAVARSKKGEIKDWILMDENYEFCFSLYKDSLILIQTKDMQEPEFVYYNAFTSSTVSLIVSKHDNKFETLSKNQKILFKNANEKEVIAKSIGIQNLKVFEKYIVSALGEVTKAEFRQREDFKK

SEQ ID NO: 886 - protein, 987 aa, Campylobacter jejuni
MARILAFDIGISSIGWAFSENDELKDCGVRIFTKAENPKTGESLALPRRLARSARKRLARRKARLNHLKHLIANEFKLNYEDYQSFDESLAKAYKGSLISPYELRFRALNELLSKQDFARVILHIAKRRGYDDIKNSDDKEKGAILKAIKQNEEKLANYQSVGEYLYKEYFQKFKENSKEFTNVRNKKESYERCIAQSFLKDELKLIFKKQREFGFSFSKKFEEEVLSVAFYKRALKDFSHLVGNCSFFTDEKRAPKNSPLAFMFVALTRIINLLNNLKNTEGILYTKDDLNTLLNEVLKNGTLTYKQTKKLLGLSDDYEFKGEKGTYFIEFKKYKEFIKSLGDHSLSQDDLNEIAKDITLIKDEIKLKKALAKYDLNQNQIDSLSKLEFKDHLNISFKALKLITPLMLEGKKYDEACNELNLKVAINEDKKDFLPAFNETYYKDEVTNPVVLRAIKEYRKVLNALLKKYGKVHKINIELAREVGKNHSQRAKIEKEQNENYKAKKDAELECEKLGLKINSKNILKLRLFKEQKEFCAYSGEKIKISDLQDEKMLEIDHIYPYSRSFDDSYMNKVLVFTKQNQEKLNQTPFEAFGNDSAKWQKIEVLAKNLPTKKQKRILDKNYKDKEQKNFKDRNLNDTRYIARLVLNYTKDYLDFLPLSDDENTKLNDTQKGSKVHVEAKSGMLTSALRHTWGFSAKDRNNHLHHAIDAVIIAYANNSIVKAFSDFKKEQESNSAELYAKKISELDYKNKRKFFEPFSGFRQKVLDKIDEIFVSKPERKKPSGALHEETFRKEEEFYQSYGGKEGVLKALELGKIRKVNGKIVKNGDMFRVDIFKHKKTNKFYAVPIYTMDFALKVLPNKAVARSKKGEIKDWILMDENYEFCFSLYKDSLILIQTKDMQEPEFVYYNAFTSSTVSLIVSKHDNKFETLSKNQKILFKNANEKEVIAKSIGIQNLKVFEKYIVSALGEVTKAEFRQREDFKNELR

SEQ ID NO: 887 - protein, 987 aa, Campylobacter jejuni
MARILAFDIGISSIGWAFSENDELKDCGVRIFTKAENPKTGESLALPRRLARSARKRLARRKARLNHLKHLIANEFKLNYEDYQSFDESLAKAYKGSLISPYELRFRALNELLSKQDFARVILHIAKRRGYDDIKNSDDKEKGAILKAIKQNEEKLANYQSVGEYLYKEYFQKFKENSKEFTNVRNKKESYERCIAQSFLKDELKLIFKKQREFGFSFSKKFEEEVLSVAFYKRALKDFSHLVGNCSFFTDEKRAPKNSPLAFMFVALTRIINLLNNLKNTEGILYTKDDLNALLNEVLKNGTLTYKQTKKLLGLSDDYEFKGEKGTYFIEFKKYKEFIKALGDHSLSQDDLNEIAKDITLIKDEIKLKKALVKYDLNQNQIDSLSKLEFKDHLNISFKALKLITPLMLEGKKYDEACNELNLKVAINEDKKDFLPAFNETYYKDEVTNPVVLRAIKEYRKVLNALLKKYGKVHKINIELAREVGKNYSQRAKIEKEQNENYKAKKDAELECEKLGLKINSKNILKLRLFKEQKEFCAYSGEKIKISDLQDEKMLEIDHIYPYSRSFDDSYMNKVLVFTKQNQEKLNQTPFEAFGNDSAKWQKIEVLAKNLPTKKQKRILDKNYKDKEQKDFKDRNLNDTRYIARLVLNYTKDYLDFLPLSDDENTKLNDTQKGSKVHVEAKSGMLTSALRHTWGFSAKDRNNHLHHAIDAVIIAYANNSIVKAFSDFKKEQESNSAELYAKKISELDYKNKRKFFEPFSGFRQKVLDKIDEIFVSKPERKKPSGALHEETFRKEEEFYQSYGGKEGVLKALELGKIRKVNGKIVKNGDMFRVDIFKHKKTNKFYAVPIYTMDFALKVLPNKAVARSKKGEIKDWILMDENYEFCFSLYKDSLILIQTKDMQEPELVYFNAFTSSTVSLIVSKHDNKFETLSKNQKILFKNANEKEVIAKSIGIQNLKVFEKYIVSALGEVTKAEFRQREDFKNELR

SEQ ID NO: 888 - protein, 983 aa, Campylobacter jejuni; identical to SEQ ID NO: 231

SEQ ID NO: 889 - protein, 987 aa, Campylobacter jejuni
MARILAFDIGISSIGWAFSENDELKDCGVRIFTKAENPKTGESLALPRRLARSARKRLARRKARLNHLKHLIANEFKLNYEDYQSFDESLAKAYKGSLISPYELRFRALNELLSKQDFARVILHIAKRRGYDDIKNSDDKEKGAILKAIKQNEEKLVNYQSVGEYLYKEYFQKFKENSKEFTNVRNKKESYERCIAQSFLKDELKLIFKKQREFGFSFSKKFEEEVLSVAFYKRALKDFSHLVGNCSFFTDEKRAPKNSPLAFMFVALTRIINLLNNLKNTEGILYTKDDLNALLNEVLKNGTLTYKQTKKLLGLSDDYEFKGEKGTYFIEFKKYKEFIKALGDHSLSQDDLNEIAKDITLIKDEIKLKKALAKYDLNQNQIDSLSKLEFKDHLNISFKALKLITPLMLEGKKYDEACNELNLKVAINEDKKDFLPAFNETYYKDEVTNPVVLRAIKEYRKVLNALLKKYGKVHKINIELAREVGKNYSQRAKIEKEQNENYKAKKDAELECEKLGLKINSKNILKLRLFKEQKEFCAYSGEKIKISDLQDEKMLEIDHIYPYSRSFDDSYMNKVLVFTKQNQEKLNQTPFEAFGNDSAKWQKIEVLAKNLPTKKQKRILDKNYKDKEQKDFKDRNLNDTRYIARLVLNYTKDYLDFLPLSDDENTKLNDTQKGSKVHVEAKSGMLTSALRHTWGFSAKDRNNHLHHAIDAVIIAYANNSIVKAFSDFKKEQESNSAELYAKKISELDYKNKRKFFEPFSGFRQKVLDKIDEIFVSKPERKKPSGALHEETFRKEEEFYQSYGGKEGVLKALELGKIRKVNGKIVKNGDMFRVDIFKHKKTNKFYAVPIYTMDFALKVLPNKAVARSEKGEIKDWILMDENYEFCFSLYKDSLILIQTKDMQEPELVYFNAFTSSTVSLIVSKHDNKFETLSKNQKILFKNANEKEVIAKSIGIQNLKVFEKYIVSALGEVTKAEFRQREDFKNELR

SEQ ID NO: 890 - protein, 987 aa, Campylobacter jejuni
MARILAFDIGISSIGWAFSENDELKDCGVRIFTKAENPKTGESLALPRRLARSARKRLARRKARLNHLKHLIANEFKLNYEDYQSFDESLAKAYKGSLISPYELRFRALNELLSKQDFARVILHIAKRRGYDNIKNSDNEEKSEILKAIKQNEEKLVNYQSVGEYLYKEYFQKFKENSKEFINVRNKKESYERCIAQSFLKDELKLIFQKQREFGLSFSKKFEEEVLSVAFYKRALKDFSHLVGNCSFFTDEKRAPKNSPLAFMFVALTRIINLLNNLKNTEGILYTKDDLNTLLNEVLKNGTLTYKQTKKLLGLSDDYEFKGEKGTYFIEFKKYKEFIKALGDHSLSQDDLNEIAKDITLIKDEIKLKKALAKYDLNQNQIDSLSKLEFKDHLNISFKALKLITPLMLEGKKYDEACNELNLKVVINEDKKDFLPAFNETYYKDEVTNPVVLRAIKEYRKVLNALLKKYGKVHKINIELAREVGKNHSQRAKIEKEQNENYKAKKDAELECEKLGLKINNKNILKLRLFKEQKEFCAYSGEKIKLSDLQDEKMLEIDHIYPYSRSFDDSYMNKVLVFTKQNQEKLNKTPFEAFGNDSTKWQKIEVLAKNLPTKKQKRILDKNYKDKEQKDFKDRNLNDTRYIARLVLNYTKDYLDFLPLSDDENTKLNDIQKGSKVHVEAKSGMLTSALRHTWGFSTKDRNNHLHHAIDAVIIAYANNSIVKAFSDFKKEQESNSAELYAKKISELDYKNKRKFFEPFSGFRQKVLDKIDEIFVSKPERKKPSGALHEETFRKEEEFYQSYGGKEGVLKALELGKIRKVNGKIVKNGDMFRVDIFKHKKTNKFYAVPIYTMDFALKVLPNKAVVQGKDKKSGLIKDWILMDENYEFCFSLYKDSLILIQTKDMQEPEFVYYNAFTSSTVSLIVSKHDNKFETLSKNQKILFKNANEKEVIAKSIGIQNLKVFEKYIVSALGEVTKAEFRQREDFKK

SEQ ID NO: 891 - protein, 984 aa, Campylobacter jejuni
MARILAFDIGISSIGWAFSENDELKDCGVRIFTKAENPKTGESLALPRRLARSARKRLARRKARLNHLKHLIANEFKLNYEDYQSFDESLAKAYKGSLISPYELRFRALNELLSKQDFARVILHIVKRRGYDDIKNSDDKEKGAILKAIKQNEEKLANYQSVGEYLYKEYFQKFKENSKEFTNVRNKKESYERCIAQSFLKDELKLIFKKQREFGFSFSKKFEEEVLSVAFYKRALKDFSHLVGNCSFFTDEKRAPKNSPLAFMFVALTRIINLLNNLKNTEGILYTKDDLNTLLNEVLKNGTLTYKQTKKLLGLSDDYEFKGEKGTYFIEFKKYKEFIKALGDHSLSQDDLNEIAKDITLIKDEIKLKKALAKYDLNQNQIDSLSKLEFKDHLNISFKALKLITPLMLEGKKYDEACNELNLKVAINEDKKDFLPAFNETYYKDEVTNPVVLRAIKEYRKVLNALLKKYGKVHKINIELAREVGKNHSQRAKIEKEQNENYKAKKDAEFECEKLGLKINSKNILKLRLFKEQKEFCAYSGEKIKISDLQDEKMLEIDHIYPYSRSFDDSYMNKVLVFTKQNQEKLNKTPFEAFGNDSAKWQKIEVLAKNLPTKKQKRILDKNYKDKEQKDFKDRNLNDTRYIARLVLNYTKDYLDFLPLSDDENTKLNDTQKGSKVHVEAKSGMLTSALRHTWGFSTKDRNNHLHHAIDAVIIAYANNSIVKAFSDFKKEQESNSAELYAKKISELDYKNKRKFFEPFSGFRQKVLDKIDEIFVSKPERKKPSGALHEETFRKEEEFYQSYGGKEGVLKALELGKIRKVNGKIVKNGDMFRVDIFKHKKTNKFYAVPIYTMDFALKVLPNKAVARSKKGEIKDWILMDENYEFCFSLYKDSLILIQTKDMQEPEFVYYNAFTSSTVSLIVSKHDNKFETLSKNQKILFKNANEKEVIAKSIGIQNLKVFEKYIVSALGEVTKAEFRQREDFKK

SEQ ID NO: 892 - protein, 984 aa, Campylobacter jejuni
MARILAFDIGISSIGWAFSENDELKDCGVRIFTKAENPKTGESLALPRRLARSARKRLARRKARLNHLKHLIANEFKLNYEDYQSFDESLAKAYKGSLISPYELRFRALNELLSKQDFARVILHIVKRRGYDDIKNSDDKEKGTILKAIKQNEEKLANYQSVGEYLYKEYFQKFKENSKEFTNVRNKKESYERCIAQSFLKDELKLIFKKQREFGFSFSKKFEEEVLSVAFYKRALKDFSHLVGNCSFFTDEKRAPKNSPLAFMFVALTRIINLLNNLKNTEGILYTKDDLNTLLNEVLKNGTLTYKQTKKLLGLSDDYEFKGEKGTYFIEFKKYKEFIKALGEHNLSQDDLNEIAKDITLIKDEIKLKKALAKYDLNQNQIDSLSKLEFKDHLNISFKALKLITPLMLEGKKYDEACNELNLKVAINEDKKDFLPAFNETYYKDEVTNPVVLRAIKEYRKVLNALLKKYGKVHKINIELAREVGKNYSQRAKIEKEQNENYKAKKDAELECEKLGLKINSKNILKLRLFKEQKEFCAYSGEKIKISDLQDEKMLEIDHIYPYSRSFDDSYMNKVLVFTKQNQEKLNQTPFEAFGNDSAKWQKIEVLAKNLPTKKQKRILDKNYKDKEQKDFKDRNLNDTRYIARLVLNYTKDYLDFLPLSDDENTKLNDTQKGSKVHVEAKSGMLTSALRHTWGFSAKDRNNHLHHAIDAVIIAYANNSIVKAFSDFKKEQESNSAELYAKKISELDYKNKRKFFEPFSGFRQKVLDKIDEIFVSKPERKKPSGALHEETFRKEEEFYQSYGGKEGVLKALELGKIRKVNGKIVKNGDMFRVDIFKHKKTNKFYAVPIYTMDFALKVLPNKAVARSKKGEIKDWILMDENYEFCFSLYKDSLILIQTKDMQEPEFVYYNAFTSSTVSLIVSKHDNKFETLSKNQKILFKNANEKEVIAKSIGIQNLKVFEKYIVSALGEVTKAEFRQREDFKK

SEQ ID NO: 893 - protein, 987 aa, Campylobacter jejuni
MARILAFDIGISSIGWAFSENDELKDCGVRIFTKAENPKTGESLALPRRLARSARKRLARRKARLNHLKHLIANEFKLNYEDYQSFNESLAKAYKGSLISPYELRFRALNELLSKQDFARVILHIAKRRGYDDIKNSDDKEKGAILKVIKQNEEKLANYQSVGEYLYKEYFQKFKENSKEFTNVRNKKESYERCIAQSFLKDELKLIFQKQREFGFSFSKKFEEEVLSVAFYKRALKDFSHLVGNCSFFTDEKRAPKNSPLAFMFVALTRIINLLNNLKNTEGILYTKDDLNALLNEVLKNGTLTYKQTKKLLGLSDDYEFKGEKGTYFIEFKKYKEFIKALGDHSLSQDDLNEIAKDITLIKDEIKLKKALAKYDLNQNQIDSLSKLEFKDHLNISFKALKLITPLMLEGKKYDEACNELNLKVAINEDKKDFLPAFNETYYKDEVTNPVVLRAIKEYRKVLNALLKKYGKVHKINIELAREVGKNYSQRAKIEKEQNENYKAKKDAELECEKLGLKINSKNILKLRLFKEQKEFCAYSGEKIKISDLQDEKMLEIDHIYPYSRSFDDSYMNKVLVFTKQNQEKLNQTPFEAFGNDSAKWQKIEVLAKNLPTKKQKRILDKNYKDKEQKDFKDRNLNDTRYIARLVLNYTKDYLDFLPLSDDENTKLNDTQKGSKVHVEAKSGMLTSALRHTWGFSAKDRNNHLHHAIDAVIIAYANNSIVKAFSDFKKEQESNSAELYAKKISELDYKNKRKFFEPFSGFRQKVLDKIDEIFVSKPERKKPSGALHEETFRKEEEFYQSYGGKEGVLKALELGKIRKVNGKIVKNGDMFRVDIFKHKKTNKFYAVPIYTMDFALKVLPNKAVARSKKGEIKDWILMDENYEFCFSLYKDSLILIQTKDMQEPELVYFNAFTSSTVSLIVSKHDNKFETLSKNQKILFKNANEKEVIAKSIGIQNLKVFEKYIVSALGEVTKAEFRQREDFKNELR

SEQ ID NO: 894 - protein, 984 aa, Campylobacter jejuni
MARILAFDIGISSIGWAFSENDELKDCGVRIFTKAENPKTGESLALPRRLARSARKRLARRKARLNRLKHLIANEFKLNYEDYQSFDESLAKAYKGSLISPYELRFRALNELLSKQDFARVILHIAKRRGYDDIKNSDDKEKGAILKAIKQNEEKLANYQSVGEYLYKEYFQKFKENSKEFTNVRNKKESYERCIAQSFLKDELKLIFKKQREFGFSFSKKFEEEVLSVAFYKRALKDFSHLVGNCSFFTDEKRAPKNSPLAFMFVALTRIINLLNNLKNTEGILYTKDDLNALLNEVLKNGTLTYKQTKKLLGLSDDYEFKGEKGTYFIEFKKYKEFIKALGDHSLNQDDLNEIAKDITLIKDEIKLKKALAKYDLNQNQIDSLSKLEFKDHLNISFKALKLITPLMLEGKKYDEACNELNLKVAINEDKKDFLPAFNETYYKDEVTNPVVLRAIKEYRKVLNALLKKYGKVHKINIELAREVGKNYSQRAKIEKEQNENYKAKKDAELECEKLGLKINSKNILKLRLFKEQKEFCVYSGEKIKISDLQDEKMLEIDHIYPYSRSFDDSYMNKVLVFTKQNQEKLNQTPFEAFGNDSAKWQKIEVLAKNLPTKKQKRILDKNYKDKEQKDFKDRNLNDTRYIARLVLNYTKDYLDFLPLSDDENTKLNDTQKGSKVYVEAKSGMLTSALRHTWGFSTKDRNNHLHHAIDAVIIAYANNSIVKAFSDFKKEQESNSAELYAKKISELDYKNKRKFFEPFSGFRQKVLDKIDEIFVSKPERKKPSGALHEETFRKEEEFYQSYGGKEGVLKALELGKIRKVNGKIVKNGDMFRVDIFKHKKTNKFYAVPIYTMDFALKVLPNKAVARSKKGEIKDWILMDENYEFCFSLYKDSLILIQTKDMQEPEFVYYNAFTSSTVSLIVSKHDNKFETLSKNQKILFKNANEKEVIAKSIGIQNLKVFEKYIVSALGEVTKAEFRQREDFKK

SEQ ID NO: 895 - protein, 984 aa, Campylobacter jejuni
MARILAFDIGISSIGWAFSENDELKDCGVRIFTKVENPKTGESLALPRRLARSARKRLARRKARLNHLKHLIANEFKLNYEDYQSFDESLAKAYKGSLISPYELRFRALNELLSKQDFARVILHIAKRRGYDDIKNSDDKEKGAILKAIKQNEEKLANYQSVGEYLYKEYFQKFKENSKEFTNVRNKKESYERCIAQSFLKDELKLIFKKQREFGFSFLKKFEEEVLSVAFYKRALKDFSHLVGNCSFFTDEKRAPKNSPLAFMFVALTRIINLLNNLKNTEGILYTKDDLNALLNEVLKNGTLTYKQTKKLLGLSDDYEFKGEKGTYFIEFKKYKEFIKALGEHNLSQDDLNEIAKDITLIKDEIKLKKALAKYDLNQNQIDSLSKLEFKDHLNISFKALKLITPLMLEGKKYDEAYNELNLKVAINEDKKDFLPAFNETYYKDEVTNPVVLRAIKEYRKVLNALLKKYGKVHKINIELAREVGKNHSQRAKIEKEQNENYKAKKDAELECEKLGLKINSKNILKLRLFKEQKEFCAYSGEKIKISDLQDEKMLEIDHIYPYSRSFDDSYMNKVLVFTKQNQEKLNQTPFEAFGNDSAKWQKIEVLAKNLPTKKQKRILDKNYKDKEQKDFKDRNLNDTRYIARLVLNYTKDYLDFLPLSDDENTKLNDTQKGSKVHVEAKSGMLTSALRHTWGFSAKDRNNHLHHAIDAVIIAYANNSIVKAFSDFKKEQESNSAELYAKKISELDYKNKRKFFEPFSGFRQKVLDKIDEIFVSKPERKKPSGALHEETFRKEEEFYQSYGGKEGVLKALELGKIRKVNGKIVKNGDMFRVDIFKHKKTNKFYAVPIYTMDFALKVLPNKAVARSKKGEIKDWILMDENYEFCFSLYKDSLILIQTKDMQEPELVYFNAFTSSTVSLIVSKHDNKFETLSKNQKILFKNANEKEVIAKSIGIQNLKVFEKYIVSALGEVTKAEFRQREDFKK

SEQ ID NO: 896 - protein, 984 aa, Campylobacter jejuni
MARILAFDIGISSIGWAFSENDELKDCGVRIFTKVENPKTGESLALPRRLARSARKRLARRKARLNHLKHLIANEFKLNYEDYQSFDESLAKAYKGSLISPYELRFRALNELLSKQDFARVILHIAKRRGYDDIKNSDDKEKGAILKAIKQNEEKLANYQSVGEYLYKEYFQKFKENSKEFTNVRNKKESYERCIAQSFLKDELKLIFKKQREFGFSFSKKFEEEVLSVAFYKRALKDFSHLVGNCSFFTDEKRAPKNSPLAFMFVALTRIINLLNNLKNTEGILYTKDDLNALLNEVLKNGTLTYKQTKKLLGLSDDYEFKGEKGTYFIEFKKYKEFIKALGEHNLSQDDLNEIAKDITLIKDEIKLKKALAKYDLNQNQIDSLSKLEFKDHLNISFKALKLITPLMLEGKKYDEACNELNLKVAINEDKKDFLPAFNETYYKDEVTNPVVLRAIKEYRKVLNALLKKYGKVHKINIELAREVGKNHSQRAKIEKEQNENYKAKKDAELECEKLGLKINSKNILKLRLFKEQKEFCAYSGEKIKISDLQDEKMLEIDHIYPYSRSFDDSYMNKVLVFTKQNQEKLNKTPFEAFGNDSAKWQKIEVLAKNLPTKKQKRILDKNYKDKEQKDFKDRNLNDTRYIARLVLNYTKDYLDFLPLSNDENTKLNDTQKGSKVHVEAKSGMLTSALRHTWGFSTKDRNNHLHHAIDAVIIAYANNSIVKAFSDFKKEQESNSAELYAKKISELDYKNKRKFFEPFSGFRQKVLDKIDEIFVSKPERKKPSGALHEETFRKEEEFYQSYGGKEGVLKALELGKIRKVNGKIVKNGDMFRVDIFKHKKTNKFYAVPIYTMDFALKVLPNKAVARSKKGEIKDWILMDENYEFCFSLYKDSLILIQTKDMQEPEFVYYNAFTSSTVSLIVSKHDNKFETLSKNQKILFKNANEKEVIAKSIGIQNLKVFEKYIVSALGEVTKAEFRQREDFKK

SEQ ID NO: 897 - protein, 984 aa, Campylobacter jejuni
MARILAFDIGISSIGWAFSENDELKDCGVRIFTKVENPKTGESLALPRRLARSARKRLARRKARLNHLKHLIANEFKLNYEDYQSFDESLAKAYKGSLISPYELRFRALNELLSKQDFARVILHIAKRRGYDDIKNSDDKEKGAILKAIKQNEEKLANYQSVGEYLYKEYFQKFKENSKEFTNVRNKKESYERCIAQSFLKDELKLIFKKQREFGFSFSKKFEEEVLSVAFYKRALKDFSHLVGNCSFFTDEKRAPKNSPLAFMFVALTRIINLLNNLKNTEGILYTKDDLNALLNEVLKNGTLTYKQTKKLLGLSDDYEFKGEKGTYFIEFKKYKEFIKALGEHNLSQDDLNEIAKDITLIKDEIKLKKALAKYDLNQNQIDSLSKLEFKDHLNISFKALKLITPLMLEGKKYDEACNELNLKVAINEDKKDFLPAFNETYYKDEVTNPVVLRAIKEYRKVLNALLKKYGKVHKINIELAREVGKNHSQRAKIEKEQNENYKAKKDAELECEKLGLKINSKNILKLRLFKEQKEFCAYSGEKIKISDLQDEKMLEIDHIYPYSRSFDDSYMNKVLVFTKQNQEKLNKTPFEAFGNDSAKWQKIEVLAKNLPTKKQKRILDKNYKDKEQKDFKDRNLNDTRYIARLVLNYTKDYLDFLPLSDDENTKLNDTQKGSKVHVEAKSGMLTSALRHTWGFSTKDRNNHLHHAIDAVIIAYANNSIVKAFSDFKKEQESNSAELYAKKISELDYKNKRKFFEPFSGFRQKVLDKIDEIFVSKPERKKPSGALHEETFRKEEEFYQSYGGKEGVLKALELGKIRKVNGKIVKNGDMFRVDIFKHKKTNKFYAVPIYTMDFALKVLPNKAVARSKKGEIKDWILMDENYEFCFSLYKDSLILIQTKDMQEPEFVYYNAFTSSTVSLIVSKHDNKFETLSKNQKILFKNANEKEVIAKSIGIQNLKVFEKYIVSALGEVTKAEFRQREDFKK

SEQ ID NO: 898 - protein, 984 aa, Campylobacter jejuni
MARILAFDIGISSIGWAFSENDELKDCGVRIFTKVENPKTGESLALPRRLARSARKRLARRKARLNHLKHLIANEFKLNYEDYQSFDESLAKAYKGSLISPYELRFRALNELLSKQDFARVILHIAKRRGYDDIKNSDDKEKGAILKAIKQNEEKLANYQSVGEYLYKEYFQKFKENSKEFTNVRNKKESYERCIAQSFLKDELKLIFKKQREFGFSFSKKFEEEVLSVAFYKRALKDFSHLVGNCSFFTDEKRAPKNSPLAFMFVTLTRIINLLNNLKNTEGILYTKDDLNALLNEVLKNGTLTYKQTKKLLGLSDDYEFKGEKGTYFIEFKKYKEFIKALGEHNLSQDDLNEIAKDITLIKDEIKLKKALAKYDLNQNQIDSLSKLEFKDHLNISFKALKLITPLMLEGKKYDEACNELNLKVAINEDKKDFLPAFNETYYKDEVTNPVVLRAIKEYRKVLNALLKKYGKVHKINIELAREVGKNHSQRAKIEKEQNENYKAKKDAELECEKLGLKINSKNILKLRLFKEQKEFCAYSGEKIKISDLQDEKMLEIDHIYPYSRSFDDSYMNKVLVFTKQNQEKLNKTPFEAFGNDSAKWQKIEVLAKNLPTKKQKRILDKNYKDKEQKDFKDRNLNDTRYIARLVLNYTKDYLDFLPLSDDENTKLNDTQKGSKVHVEAKSGMLTSALRHTWGFSTKDRNNHLHHAIDAVIIAYANNSIVKAFSDFKKEQESNSAELYAKKISELDYKNKRKFFEPFSGFRQKVLDKIDEIFVSKPERKKPSGALHEETFRKEEEFYQSYGGKEGVLKALELGKIRKVNGKIVKNGDMFRVDIFKHKKTNKFYAVPIYTMDFALKVLPNKAVARSKKGEIKDWILMDENYEFCFSLYKDSLILIQTKDMQEPEFVYYNAFTSSTVSLIVSKHDNKFETLSKNQKILFKNANEKEVIAKSIGIQNLKVFEKYIVSALGEVTKAEFRQREDFKK

SEQ ID NO: 899 - protein, 984 aa, Campylobacter jejuni
MARILAFDIGISSIGWAFSENDELKDCGVRIFTKVENPKTGESLALPRRLARSARKRLARRKARLNHLKHLIANEFKLNYEDYQSFDESLAKAYKGSLISPYELRFRALNELLSKQDFARVILHIAKRRGYDDIKNSDDKEKGAILKAIKQNEEKLANYQSVGEYLYKEYFQKFKENSKEFTNVRNKKESYERCIAQSFLKDELKLIFKKQREFGFSFSKKFEEEVLSVAFYKRALKDFSHLVGNCSFFTDEKRAPKNSPLAFMFVALTRIINLLNNLKNTEGILYTKDDLNALLNEVLKNGTLTYKQTKKLLGLSDDYEFKGEKGTYFIEFKKYKEFIKALGEHNLSQDDLNEIAKDITLIKDEIKLKKALAKYDLNQNQIDSLSKLEFKDHLNISFKALKLITPLMLEGKKYDEACNELNLKVAINEDKKDFLPAFNETYYKDEVTNPVVLRAIKEYRKVLNALLKKYGKVHKINIELAREVGKNHSQRAKIEKEQNENYKAKKDAELECEKLGLKINSKNILKLRLFKEQKEFCAYSGEKIKISDLQDEKMLEIDHIYPYSRSFDDSYMNKVLVFTKQNQEKLNKTPFEAFGNDSAKWQKIEVLAKNLPTKKQKRILDKNYKDKEQKDFKDRNLNDTRYIARLVLNYTKDYLDFLPLSDDENTKLNDTQKGSKVHVEAKSGMLTSALRHTWGFSTKDRNNHLHHAIDAVIIAYANNSIVKAFSDFKKEQESNSAELYAKKISELDYKNKRKFFEPFSGFRQKVLDKIDEIFVSKPERKKPSGALHEETFRKEEEFYQSYGGKEGVLKALELGKIRKVNGKIVKNGDMFRVDIFKHKKTNKFYAVPIYTMDFALKVLPNKAVARSKKGEIKDWILMDENYEFCFSLYKDSLILIQTKDMQEPEFVYYNAFTSSTVSLIVSKHDNKFETLSKNQKILFKNANEKEVIAKSIGIQNLKVFEKYIVSALGEVTKAEFIQREDFKK

SEQ ID NO: 900 - protein, 987 aa, Campylobacter jejuni
MARILAFDIGISSIGWAFSENDELKDCGVRIFTKVENPKTGESLALPRRLARSARKRLARRKARLNHLKHLIANEFKLNYEDYQSFDESLAKAYKGSLISPYELRFRALNELLSKQDFARVILHIAKRRGYDDIKNSDDKEKGAILKAIKQNEEKLANYQSVGEYLYKEYFQKFKENSKEFTNVRNKKESYERCIAQSFLKDELKLIFKKQREFGFSFSKKFEEEVLSVAFYKRALKDFSHLVGNCSFFTDEKRVPKNSPLAFMFVALTRIINLLNNLKNTEGILYTKDDLNALLNEVLKNGTLTYKQTKKLLGLSDDYEFKGEKGTYFIEFKKYKEFIKALGEHNLSQDDLNEIAKDITLIKDEIKLKKALAKYDLNQNQIDSLSKLEFKDHLNISFKALKLITPLMLEGKKYDEACNELNLKVAINEDKKDFLPAFNETYYKDEVTNPVVLRAIKEYRKVLNALLKKYGKVHKINIELAREVGKNHSQRAKIEKEQNENYKAKKDAELECEKLGLKINSKNILKLRLFKEQKEFCAYSGEKIKISDLQDEKMLEIDHIYPYSRSFDDSYMNKVLVFTKQNQEKLNQTPFEAFGNDSAKWQKIEVLAKNLPTKKQKRILDKNYKDKEQKNFKDRNLNDTRYIARLVLNYTKDYLDFLPLSDDENTKLNDTQKGSKVHVEAKSGMLTSALRHTWGFSAKDRNNHLHHAIDAVIIAYANNSIVKAFSDFKKEQESNSAELYAKKISELDYKNKRKFFEPFSGFRQKVLDKIDEIFVSKPERKKPSGALHEETFRKEEEFYQSYGGKEGVLKALELGKIRKVNGKIVKNGDMFRVDIFKHKKTNKFYGVPIYTMDFALKVLPNKAVARSKKGEIKDWILMDENYEFCFSLYKDSLILIQTKDMQEPEFVYYNAFTSSTVSLIVSKHDNKFETLSKNQKILFKNANEKEVIAKSIGIQNLKVFEKYIVSALGEVTKAEFRQREDFKNELR

SEQ ID NO: 901 - protein, 984 aa, Campylobacter jejuni
MARILAFDIGISSIGWAFSENDELKDCGVRIFTKVENPKTGESLALPRRLARSARKRLARRKVRLNHLKHLIANEFKLNYEDYQSFDESLAKAYKGSLISPYELRFRALNELLSKQDFARVILHIAKRRGYDDIKNSDDKEKGAILKAIKQNEEKLANYQSVGEYLYKEYFQKFKENSKEFTNVRNKKESYERCIAQSFLKDELKLIFKKQREFGFSFSKKFEEEVLSVAFYKRALKDFSHLVGNCSFFTDEKRAPKNSPLAFMFVALTRIINLLNNLKNTEGILYTKDDLNALLNEVLKNGTLTYKQTKKLLGLSDDYEFKGEKGTYFIEFKKYKEFIKALGEHNLSQDDLNEIAKDITLIKDEIKLKKALAKYDLNQNQIDSLSKLEFKDHLNISFKALKLITPLMLEGKKYDEACNELNLKVAINEDKKDFLPAFNETYYKDEVTNPVVLRAIKEYRKVLNALLKKYGKVHKINIELAREVGKNHSQRAKIEKEQNENYKAKKDAELECEKLGLKINSKNILKLRLFKEQKEFCAYSGEKIKISDLQDEKMLEIDHIYPYSRSFDDSYMNKVLVFTKQNQEKLNKTPFEAFGNDSAKWQKIEVLAKNLPTKKQKRILDKNYKDKEQKDFKDRNLNDTRYIARLVLNYTKDYLDFLPLSDDENTKLNDTQKGSKVHVEAKSGMLTSALRHTWGFSTKDRNNHLHHAIDAVIIAYANNSIVKAFSDFKKEQESNSAELYAKKISELDYKNKRKFFEPFSGFRQKVLDKIDEIFVSKPERKKPSGALHEETFRKEEEFYQSYGGKEGVLKALELGKIRKVNGKIVKNGDMFRVDIFKHKKTNKFYAVPIYTMDFALKVLPNKAVARSKKGEIKDWILMDENYEFCFSLYKDSLILIQTKDMQEPEFVYYNAFTSSTVSLIVSKHDNKFETLSKNQKILFKNANEKEVIAKSIGIQNLKVFEKYIVSALGEVTKAEFRQREDFKK

SEQ ID NO: 902 - protein, 721 aa, Campylobacter jejuni
MFVALTRIINLLNNLKNTEGILYTKDDLNTLLNEVLKNGTLTYKQTKKLLGLSDDYEFKGEKGTYFIEFKKYKEFIKALGDHSLSQDDLNEIAKDITLIKDEIKLKKALAKYDLNQNQIDSLSKLEFKDHLNISFKALKLITPLMLEGKKYDEACNELNLKVAINEDKKDFLPAFNETYYKDEVTNPVVLRAIKEYRKVLNALLKKYGKVHKINIELAREVGKNYSQRAKIEKEQNENYKAKKDAELECEKLGLKINSKNILKLRLFKEQKEFCAYSGEKIKISDLQDEKMLEIDHIYPYSRSFDDSYMNKVLVFTKQNQEKLNQTPFEAFGNDSAKWQKIEVLAKNLPTKKQKRILDKNYKDKEQKDFKDRNLNDTRYIARLVLNYTKDYLDFLPLSDDENTKLNNTQKGSKVYVEAKSGMLTSALRHTWGFSTKDRNNHLHHAIDAVIIAYANNSIVKAFSDFKKEQESNSAELYAKKISELDYKNKRKFFEPFSGFRQKVLDKIDEIFVSKPERKKPSGALHEETFRKEEEFYQSYGGKEGVLKALELGKIRKVNGKIVKNGDMFRVDIFKHKKTNKFYAVPIYTMDFALKVLPNKAVARSKKGEIKDWILMDENYEFCFSLYKDSLILIQTKDMQEPEFVYYNAFTSSTVSLIVSKHDNKFETLSKNQKILFKNANEKEVIAKSIGIQNLKVFEKYIVSALGEVTKAEFRQREDFKK

SEQ ID NO: 903 - protein, 512 aa, Campylobacter jejuni
MHKINIELAREVGKNHSQRAKIEKEQNENYKAKKDAEIECEKLGLKINSKNILKLRLFKEQKEFCAYSGEKIKLSDLQDEKMLEIDHIYPYSRSFDDSYMNKVLVFTKQNQEKLNKTPFEAFGNDSTKWQKIEVLAKNLPEKKQKRILDKNYKDKEQKDFKDRNLNDTRYIARLVLNYTKDYLDFLPLSDDENTKLNDTQKGSKVHVEAKSGMLTSALRHTWGFSAKDRNNHLHHAIDAAIIAYANNSIVKAFSDFKKEQESNSVELYAKKISELDYKNKRKFFEPFSGFRQKVLDKIDEIFVSKPERKKPSGALHEETFRKEEEFYQSYGGKEGVLKALELGKIRKVNGKIVKNGDMFRVDIFKHKKTNKFYAVPIYTMDFALKVLPNKAVARSKKGEIKDWILMDENYEFCFSLYKDSLILIQTKDMQEPELVYFNAFTSSTVSLIVSKHDNKFETLSKNQKILFKNANEKEVIAKSIGIQNLKVFEKYIVSALGEVTKAEFRQREDFKK

SEQ ID NO: 904 - protein, 965 aa, Campylobacter jejuni
MKIIGFNLGIANIGWALRENDEIIDCGVRVFDIPENPKNGNSLALERRENKARMKIVKRKKARMLATKTFLKKELNVDLSKLFLIGSTQSIYELRAKALSSLISKEELSAIILHIAKHRGYDDSALKNENGTIIEALNKNKETMLKFKSVGEYFYKNFVQNKEVKKIRNTTEDYSNSVPRSLLKQELDLILDKQKELGLIKNADFKEKLFEIIFFKRPLKDFSNKIGNCIFFENEKRAAKNTISACEFVALGKVVNLLKSIEKDIGIVYEKDSINEIMSIILDKTSISYKKIRDILNLPQEINFKGLDYSKNNVENSKLVDLKKLNEFKKALGDGFANLDKDILDSIATDITLTKDTATLKEKLKNYNVLNAEQIEKLSELVFNDHINLSLKALKQIIPLMYEGKRYDEACELCNFTIAKNQEKSEYLPLFEKTRFAKDISSPVVIRAICEFRKLLNDIIRRYGSVHKIHLELTRDFGISFSDRKKIIKEIEQNEQSRIKALETIKELKLEETSKNIQIVRLFEDQKGICPYSGLKMDLNRLDELVIDYIRPYNRSLDDSYSNKVLTFKKLSDLKQGKTPFEAFGEDEKLWAEINERIKEYNGKKRFKIFDKFFKDKKPFDFTEQTLQDTRWLTKLVASYLNEYLSFLPISEDENTALGYGEKGSKQHVILSSGMITQMLRNFWYLGFKNHKDYKNNAMDAIIVAFTTNSIIFAFNNFKKELDLAKAEFYANKISESDYLLKRKFLPPFSGFKEQALEKVKNIFVSHSLKIKNKGTLHDLTPLKIKELKNTYGDLDLAVKLGKIRKYNDKYYANANGSLVRADLFVDKKNKFHAVSIYKADFSTKKLPNKTPATTSNGETKEGIEMNENYNFCMSLYKNTPISVKIKGMKEPIICYYHGFNTSGSKITYKKHDNNYHNLSEDEMVVFRKNDKESIAVGKILEIKKYSISPSGELSLIENEERKWF

SEQ ID NO: 905 - protein, 759 aa, Campylobacter jejuni
MLSVAFYKRALKDFSHLVGNCSFFTDEKRAPKNSPLAFMFVALTRIINLLNNLKNTEGILYTKDDLNALLNEVLKNGTLTYKQTKKLLGLSDDYEFKGEKGTYFIEFKKYKEFIKALGEHNLSQDDLNEIAKDITLIKDEIKLKKALAKYDLNQNQIDSLSKLEFKDHLNISFKALKLITPLMLEGKKYDEACNELNLKVAINEDKKDFLPAFNETYYKDEVTNPVVLRAIKEYRKVLNALLKKYGKVHKINIELAREVGKNHSQRAKIEKEQNENYKAKKDAELECEKLGLKINSKNILKLRLFKEQKEFCAYSGEKIKISDLQDEKMLEIDHIYPYSRSFDDSYMNKVLVFTKQNQEKLNKTPFEAFGNDSAKWQKIEVLAKNLPTKKQKRILDKNYKDKEQKDFKDRNLNDTRYIARLVLNYTKDYLDFLPLSDDENTKLNDTQKGSKVHVEAKSGMLTSALRHTWGFSTKDRNNHLHHAIDAVIIAYANNSIVKAFSDFKKEQESNSAELYAKKISELDYKNKRKFFESFSGFRQKVLDKIDEIFVSKPERKKPSGALHEETFRKEEEFYQSYGGKEGVLKALELGKIRKVNGKIVKNGDMFRVDIFKHKKTNKFYAVPIYTMDFALKVLPNKAVARSKKGEIKDWILMDENYEFCFSLYKDSLILIQTKDMQEPEFVYYNAFTSSTVSLIVSKHDNKFETLSKNQKILFKNANEKEVIAKSIGIQNLKVFEKYIVSALGEVTKAEFRQREDFKK

SEQ ID NO: 906 - protein, 984 aa, Campylobacter jejuni
MVRILAFDIGISSIGWAFSENDELKDCGVRIFTKVENPKTGESLALPRRLARSARKRLARRKARLNHLKHLIANEFKLNYEDYQSFDESLAKAYKGSLISPYELRFRALNELLSKQDFARVILHIAKRRGYDDIKNSDDKEKGAILKAIKQNEEKLANYQSVGEYLYKEYFQKFKENSKEFTNVRNKKESYERCIAQSFLKDELKLIFKKQREFGFSFSKKFEEEVLSVAFYKRALKDFSHLVGNCSFFTDEKRAPKNSPLAFMFVALTRIINLLNNLKNTEGILYTKDDLNALLNEVLKNGTLTYKQTKKLLGLSDDYEFKGEKGTYFIEFKKYKEFIKALGEHNLSQDDLNEIAKDITLIKDEIKLKKALAKYDLNQNQIDSLSKLEFKDHLNISFKALKLITPLMLEGKKYDEACNELNLKVAINEDKKDFLPAFNETYYKDEVTNPVVLRAIKEYRKVLNALLKKYGKVHKINIELAREVGKNHSQRAKIEKEQNENYKAKKDAELECEKLGLKINSKNILKLRLFKEQKEFCAYSGEKIKISDLQDEKMLEIDHIYPYSRSFDDSYMNKVLVFTKQNQEKLNKTPFEAFGNDSAKWQKIEVLAKNLPTKKQKRILDKNYKDKEQKDFKDRNLNDTRYIARLVLNYTKDYLDFLPLSDDENTKLNDTQKGSKVHVEAKSGMLTSALRHTWGFSTKDRNNHLHHAIDAVIIAYANNSIVKAFSDFKKEQESNSAELYAKKISELDYKNKRKFFEPFSGFRQKVLDKIDEIFVSKPERKKPSGALHEETFRKEEEFYQSYGGKEGVLKALELGKIRKVNGKIVKNGDMFRVDIFKHKKTNKFYAVPIYTMDFALKVLPNKAVARSKKGEIKDWILMDENYEFCFSLYKDSLILIQTKDMQEPEFVYYNAFTSSTVSLIVSKHDNKFETLSKNQKILFKNANEKEVIAKSIGIQNLKVFEKYIVSALGEVTKAEFRQREDFKK

SEQ ID NO: 907 - protein, 1003 aa, Campylobacter lari]
MRILGFDIGINSIGWAFVENDELKDCGVRIFTKAENPKNKESLALPRRNARSSRRRLKRRKARLIAIKRILAKELKLNYKDYVAADGELPKAYEGSLASVYELRYKALTQNLETKDLARVILHIAKHRGYMNKNEKKSNDAKKGKILSALKNNALKLENYQSVGEYFYKEFFQKYKKNTKNFIKIRNTKDNYNNCVLSSDLEKELKLILEKQKEFGYNYSEDFINEILKVAFFQRPLKDFSHLVGACTFFEEEKRACKNSYSAWEFVALTKIINEIKSLEKISGEIVPTQTINEVLNLILDKGSITYKKFRSCINLHESISFKSLKYDKENAENAKLIDFRKLVEFKKALGVHSLSRQELDQISTHITLIKDNVKLKTVLEKYNLSNEQINNLLEIEFNDYINLSFKALGMILPLMREGKRYDEACEIANLKPKTVDEKKDFLPAFCDSIFAHELSNPVVNRAISEYRKVLNALLKKYGKVHKIHLELARDVGLSKKAREKIEKEQKENQAVNAWALKECENIGLKASAKNILKLKLWKEQKEICIYSGNKISIEHLKDEKALEVDHIYPYSRSFDDSFINKVLVFTKENQEKLNKTPFEAFGKNIEKWSKIQTLAQNLPYKKKNKILDENFKDKQQEDFISRNLNDTRYIATLIAKYTKEYLNFLLLSENENANLKSGEKGSKIHVQTISGMLTSVLRHTWGFDKKDRNNHLHHALDAIIVAYSTNSIIKAFSDFRKNQELLKARFYAKELTSDNYKHQVKFFEPFKSFREKILSKIDEIFVSKPPRKRARRALHKDTFHSENKIIDKCSYNSKEGLQIALSCGRVRKIGTKYVENDTIVRVDIFKKQNKFYAIPIYAMDFALGILPNKIVITGKDKNNNPKQWQTIDESYEFCFSLYKNDLILLQKKNMQEPEFAYYNDFSISTSSICVEKHDNKFENLTSNQKLLFSNAKEGSVKVESLGIQNLKVFEKYIITPLGDKIKADFQPRENISLKTSKKYGLR

SEQ ID NO: 908 - protein, 372 aa, candidate division
DNESAINQIAYILTTQKADEGIRAELDSLPLSDKAKKAIVKIKPTNFKAFGHLSIKALQKITPHILEGMTYDKACEAAGYDFKKQSASLEQITNPVVKRAITQTLKVVRAIERKYGKPYFIKVETARDLAKNFKDRNAIKKENEENQGYNEDIKSIITNGYEASPKTKGGKQLLNHLKEFNVRLNKNADFNGQQIIKVKLYREQQGKCLYSGNPIDFETMLRDDNAYQVDHIVPFSRSNNDGITNKVLVFTEENQKKADRTPFEYFGTDERRWEKFVALVETTYKTRDVKTSDKATNAINYEYNGYAMKKKQNLLLQDYKNDSWNVRALNDTRYITRFIQNYLRQNVDFAEGEEKQRIIAPNGTTTAYLRKR

SEQ ID NO: 909 - protein, 1117 aa, Capnocytophaga ochracea
MKHILGLDLGSNSIGWAFVQQDFENKQGKIIATGSRIIPMDQGILGDFERGNTVSQTAERTTYRSMRRLRERHLLRRERLHRVLHLLGFLPPHYDAQIDFTKRYGKFIDNAEPKIAYNNGNFIFMNSFNEMVEDFKKHQPQLFYKKSNGEESRIPYDWTIYYLRKKALSQKITQQELAWLILHFNQKRGYYQLRGEEETENPNKEVAFHSLKVVDVEAEAPNKKGEIWYTIRLENGWIYRRTSKNPLDDWKGKTRDFIVTTDLNDDGTIKLDKEGKEKRSFRAPDENDWNLLKKKTEHDIDFSGKPVGTYIYDHLLQNPNQKIKGKLVRTIERKYYKDELKAILAKQIALQPELFTETLLADCIRELYRKNETQQQNLLSKDFLHLFVEDIIFYQRPLCSKKSTIANCTLEKRSYIDKETNERKDAPIKVCAKSNPYYQEFRVLQWLQNLRIYEIETDREVTAEFIETPQDYEALFNFLMSQKEIDNEGLLKYFLFAKNPQIKDKAAKSELKKWLTTYRWNYVYDAADNSSKKYPMNETGYELQRYLQKVEGLPANFLTFDITYQLWHLLYSVKDKVEFEKALKKFAKKKQLDKTSFVDSFKNFKPYPNEYGSFSEKAIKKLLPLMRFGNHWDFNRIDVSTQKRIDDLINGVANEDIRTIIREKAEKYQLNSETCFQDLPLWLAQYVVYNRHAEATDIEKWTSVSDLEAYLEDFKQHSLRNPIVEQVVTETLRVVRDIWQQYSGGQANFFDEIHIELGRELKKTAEERKQLSDKNQENENTNLRIKKLLAELKEDASIQNVRPYSLVQQELLKIYEEGVFSSTDEIEEDIQKIRKKVEPTPPEIQRYKLWLEQKYKSPYTGEVISLTKLFTEEYEIEHIIPQSRYYDDSLSNKVICESAVNKLKTNQLGLEFIQNHHGEKVRITANKEVTIFTEEQYKEFVKKHYANNSAKQQKLLLNEIPEKMVARQLNDTRYISKCISEILSKIVRSDEKDEGVNSKNIIPCTGKITTALKQDWGLNDVWNELILPRFERMNQLTQTQLFTSYNDRLQKNLPTVPIEYSQGFQKKRIDHRHHAMDALVIACATREHINYMNNQHALDKSKDKKEKQQSRIDLHPL

SEQ ID NO: 910 - protein, 303 aa, Capnocytophaga ochracea
MSFKQNLRVINKATNYYEKWEEKNGVLVKKKVKQEGTNWAIRKPLHKETVSGKIVLDRKIGKDKILTATRKAVDITFTEKIISSITDTGIQKILLNYLKYKGSPEVAFSAEGLEELNKNIAQYNDGKKHQPIYKVRIFEEGSKFPLGETGAKATKYVEAAKGTNLFFGVYQGKEKRTYATIPLNEVIERQKQGLPSVPERNEKGEPLLFSLSPNDLVYVPMEGEIAETIDFNNLSKEQKERIYKTVSFTGNQCFFVQEAVASPIVNKMEYSPLNKMERDILGIMIKEVCVKLKVDRLGNIIKA

SEQ ID NO: 911 - protein, 1471 aa, Capnocytophaga sp.
MCKYFYIKNFITFVLSKSIIPMKHILGLDLGSNSIGWAFVQQDFENKQGKIIATGSRIIPMDQGILGDFERGNTVSQTAERTTYRSTRRLRERHLLRRERLHRVLHILGFLPPHYDAQIDFTKRYGKFIDNAEPKIAYNNGNFIFMNSFNEMIEDFKKHQPQLFYKKSNGEESKIPYDWTIYYLRKKALSQKITQQELAWLILHFNQKRGYYQLRGEEETENPNKEVAFHSLKVVDVEAEAPNKKGEIWYTIRLENGWIYRRTSKIPLDDWKGKTRDFIVTTDLNDDGTIKVDKEGKEKRSFRAPDENDWNLLKKKTEHDIDFSGKTVGAYIYDHLLQNPNQKIKGKLVRTIERKYYKDELKAILAKQIALQPELFTETLLADCIRELYRKNETQQQNLLSKDFLHLFVEDIIFYQRPLRSKKSTIANCTLEKRSYIDKETNERKDAPIKVCAKSNPYYQEFRVLQWLQNLRIYEIETDREVTAEFIETPQDCEALFNFLMSQKEIDNKGLLKYFLFAKNPQIKDKAAKSELKKWLTTYRWNYVYDAADNSSKKYPMNETGYELQRYLQKVEGLPANFLTFDITYQLWHLLYSVKDKVEFEKALKKFAKKKQLDKTSFVDSFKNFKPYPNEYGSFSEKAIKKLLPLMRFGNHWDFNRIDVSTQKRIDDLINGVANEDIRTIIREKAEKYQLNSETCFQDLPLWLAQYVVYNRHAEATDIEKWTSVSDLEAYLEDFKQHSLRNPIVEQVVTETLRVVRDIWQQYGGGQANFFDEIHIELGRELKKTAEERKQLSDKNQENESTNLRIKKLLAELKEDASIQNVRPYSLVQQELLKIYEEGVFSATDEVEEDIQKIRKKAEPSKADLQRYKLWLEQKYKSPYTGEVISLTKLFTEEYEIEHIIPQSRYYDDSLSNKVICESAVNKLKTNQLGLEFIQNHHGEKVRITANKEVTIFTEEQYKEFVKKHYANNSAKQQKLLLNEIPEKMVARQLNDTRYISKYISEILSKIVRSDEKDEGVNSKNIIPCTGKITTALKQDWGLNDVWNKLILPRFERMNQLTQTQLFTSYNDRLQKNLPTVPIEYSQGFQKKRIDHRHHAMDALVIACATREHINYMNNQHALDKSKDKKEKQQSRIDLRTILCEKKNNNWQFKKPWSTFTQEAKEALEHIVVSFKQNLRVINKATNYYEKWEEKNGVLVKKKVKQEGTNWAIRKPLHKETVSGKIVLDRKIGKDKILTATRKAVDITFTEKIISSITDTGIQKILLNYLKYKGSPEVAFSTEGLEELNKNIAQYNNGKKHQPIYKVRIFEEGSKFPLGETGAKATKYVEAAKGTNLFFGVYQGKGKRTYATIPLNEVIERQKQGLPSVPERNEKGEPLLFSLSPNDLVYVPMEGEIAETIDFNNLSKEQKERIYKTVSFTGNQCFFVQEAVATPIVNKMEYSPLNKMERDILGTMIKEVCIKLKVDRLGNITKA

SEQ ID NO: 912 - protein, 1450 aa, Capnocytophaga sp.
MKHILGLDLGSNSIGWAFVQQDFENKQGKIIATGSRIIPMDQGILGDFERGNTVSQTAERTTYRNTRRLRERHLLRRERLHRVLHILGFLPPHYDSQIDFTKRYGKFIDNAEPKIAYNNGNFIFMNSFNEMIEDFKKYQPQLFYKKSNGEESKIPYDWTIYYLRKKALSQKITQQELAWLILHFNQKRGYYQLRGEEETENPNKEVAFHSLEVVDVEAEAPNKKGEIWYTIRLENGWIYRRTSKIPLDDWKGKTRDFIVTTDLNDDGTIKLDKEGKEKRSFRAPDENDWNLLKKKTEHDIDFSGKTVGAYIYDHLLQNPNQKIKGKLVRTIERKYYKDELKAILAKQIALQPELFTETLLADCIRELYRKNETQQQNLLSKDFLHLFVEDIIFYQRPLRSKKSTIANCTLEKRSYIDKETNERKDTPIKVCAKSNPYYQEFRVLQWLQNLRIYEIETDREVTAEFIETAQDNEALFNFLMSQKEIDNESLLKYFLFAKNPQIKDKVAKSELKKWLTTYRWNYVYDAADNSSKKYPMNETGYELQQYLQKVEGLPANFLTFDITYRLWHLLYSVKDKVEFEKALKKFAQEYQLDEASFVDSFKNFKPYPNEYGSFSEKAIKKLLPLMRFGNHWDFNRIDVSTQKRIDDLINGVANDEIRTIIREKAEKYQLNSETCFQGLPLWLAQYVVYNRHAEAADIEKWTSVNDLEAYLEDFKQHSLRNPIVEQVITETLRVVRDIWQRYGGGQANFFDEIHIELGRELKKTAEERKQLSNRNQENENTNLRIKKLLAELKEDASIQNVRPYSPVQQELLKIYEEGVFSATDEVEEDIQKIRKKAEPTTPEIQRYKLWLEQKYKSPYTGEVISLTKLFTEEYEIEHIIPQSRYYDDSLSNKVICESAVNKLKTNQLGLEFIQNHHGEKVRITANKEVTIFTEEQYKEFVKKHYANNSAKQQKLLLNEIPEKMVARQLNDTRYISKYISEILSKIVRSDEKDEGVNSKNIIPCTGKITTALKQDWGLNDVWNELILPRFERMNQLTQTQLFTSYNDRFQKNLPTVPIEYSQGFQKKRIDHRHHAMDALVIACATREHINYMNNQHALDKSKDKKEKQQSRIDLRTILCEKKNNNWQFKKPWSTFTQEAQEALEHIVVSFKQNLRVINKATNYYEKWEEKNGVLVKKKVKQEGTNWAIRKPLHKETVSGKIVLDRKIGKDKILTATRKSVDITFTEKIISSITDTGIQKILLNYLKYKGSPEVAFSAEGLEELNKNIAQYNDGKKHQPIYKVRIFEEGSKFPLGETGAKATKYVEAAKGTNLFFGVYQGKGKRTYATIPLNEVIERQKQGLPSVPERNEKGEPLLFSLSPNDLVYVPMEGEIAETIDFNNLSKEQKERIYKTVSFTGNQCFFVQEAVATPIVNKIEYSPLNKMERDILGTMIKEVCIKLKVDRLGNITKA

SEQ ID NO: 913 - protein, 1435 aa, Capnocytophaga sp.
MKNILGLDLGTTSIGFAHIVEDENKEKSEIKELGVRIVSLATDEQSDFEKGKSISTNANRTLKHGARLNLDRYQQRRKFLIDLLQKANLITSASILAENGKNTTHSTWQLRAKAVTERIEKEEFARVLLAINKKRGYKNSRKTKTEDEGQAIDGMAIAKCLYDENLTPGQLSLQLLQQNKKLLPDFYRSDLQKEFDLVWNLQKQFYPDILTDSFYKELQGKGKDATSKAFSKRYHFDTAENKGSKESVRLQAYQWRAEAISKQLSKEEVAYVLTEINNNLNNSSGYLGAISDRSKELYFNRQTVGQYLYAQLQENRHNSLKNKVFYRQDYLDEFERIWETQASFHKELTDELKKQIRDVVIFYQRKLKSQKGLVSFCEFESKEIEIEKDGKAITKSIGARVVPKSSPLFQEFKIWQILNNVTCKRKGIRKKKSSAKSTELDLFNEPSQSIFSLDMECKQLLFDELNLKGDLKSDKVLKLLGYSPQEWEINYNQLEGNRTQKSLYEAYLKIIEIEGYEVKDILQIKSTKDDWSLDESPLSASEIRERVKVIFQTLGICTKILYFDPLLPVKEFEQQYSYQLWHLLYSYESDDSTSGNETLYRILEKKYAFKREHATILANVALQDDYGSLSTKAIRKIYPYIKENQYSTACELAGYKHSKLSLTTEELEARELKNIIPLLKKNALRNPVVEKILNQMINVVNALIEKNSERDAEGKITKYFHFDEIRIELARELKKNAQERYEMTQNINKAKLEHQKISEKLQKQFGIKNPTKSDIIRYRLYQELEHNGYKELYTNTYIAPDVLFSKNIDIEHIVPKARVFDDSFSNKTLAFKEFNIKKGESTAFDYITSLNCEGELNQYLTRVENAYKTKSISLTKYKNLLKKASEIGDGFINRDLRDTQYIAKKAKEILFQVTKNVLSTSGSITDRLREDWGLVDVMKELNMPKYQSLGLTEVEERKDGNKVTVIKDWTKRNDHRHHAMDALTVAFTKPSYIQYLNHLNARKDENNKNYSVILAIEKKETIKVPINNGKNKRVFIEPILNFRQVAKKHLEEIFISHKAKNKVVTKNINKPAGTDKQQITLTPRGQLHKETIYGKYQYYVNKEEKVGVKFDERTITKVSNPLYREALLKRLQANDNDPKKAFAGKNALSKNPIYLDEAKTKTLPEKVNLTYLEEDFSIRKDISPDNFKDLKSIEKVIDQGVKRILIKRLQAYDNDPKKAFVDLEKNPIWLNKEKGIAIKRVTISGVSNAQPLHIGKDHLGKTTLNKEGKEVPVDYVSTGNNHHVAIYRDKEGNLQEQIVSFFEAVVRAQQGLPIIDKNYKQAEGWQFMFTMKQNEMFVFPNEATGFNPAEIDLLDPKNKKLISPNLFRVQTISIVKYGNSVVRDFKFRHHLETTLQDDKILQGITFQQIKSLEPLRNIVKVRINHLGDIVNIGEY

SEQ ID NO: 914 - protein, 1432 aa, Capnocytophaga sp.
MKNILGLDLGTTSIGFAHIVEDENKEKSEIKELGVRIVSLTTDEQSDFEKGKSITTNANRTLKHGARLNLDRYQQRRKYLIDLLHKANLITPSSILAENGKNTTHSTWQLRAKAVTERIEKEEFARILLAINKKRGYKSSRKAKTEDEGQAIDGMAIAKRLYDENLTPGQLSLQLLQQNKKLLPDFYRSDLQKEFDLVWNFQKQFYPDILTDIFYKELQGKGKDATSKAFSKRYHFDTAENKGSKESVRLQAYQWRAEAVSKQLSKEEVAYVLTEINNNLNNASGYLGAISDRSKELYFNRQTVGQYLYAQLQENRHNSLKNKVFYRQDYLDEFERIWETQALFHKELTDELKKQIRDVVIFYQRKPKSQKGLISFCEFESKEIEIEKDGKTITKNIGARVVPKSSPLFQEFKIWQILNNVICKRKGIRKKKISAKTTQLDLLNESSQTIFSLDMECKQLLFDELNLKGDLKSDKVLKLLGYSPQEWEINYNQLEGNRTQKALYEAYLKIVEMEAHDVKDILQIKSTKDDWSLDESPLSASEIRESVKAIFQALGICTKILYFDPLLPVKDFEEQDSYQLWHLLYSYESDDSTSGNETLYRILEKKYAFKREHARILANVALQDDYGSLSTKAIRKIYPNIKENQYSTACEMAGYKHSKLSLTTEELEARELKNIIPLLKKNALRNPVVEKILNQMINVVNALIEKNSERDAEGKITKYFHFDEIRIELARELKKNAQKRYEMTQNINKAKSEHQKISEILQKEFGIKNPTKSDIIRYRLYKELEHNGYKELYTNTYIAPDVLFSKNIDIEHIVPKARVFDDSFSNKTLAFKDFNIKKGESTAFDYITSLKNEEKLNQYLARVENAYKTKNISPAKYKNLLKKASEIGDGFINRDLRDTQYIAKKAKEILFQVTKNVLSTSGSITDRLREDWSLVDVMKELNMPKYQSLGLTEVEERKDGNKVTVIKDWTKRNDHRHHAMDALTVAFTKPSYIQYLNHLNARKDENNKNYSVILAIEKKETIKVPTNNGKNKRVFIEPIPNFRQVAKKHLEEIFISHKAKNKVVTKNTNKPAGTNKQQITLTPRGQLHKETIYGKYQYYVNKEEKVGVKFDKETIAKVSNPLYREALLKRLQANDNDPKKAFTGKNALSKNPIYLDEAKTKTLPEKVNLTYLEEDFSVRKKIVPKNPTSKEFVPNLKSIEKVVDEGVRNILIERLRVYNNDPEKAFVDLEKNPIWLNKEKGIAIKRVTISGVNNAQPLHIGKDHLGKTTLNKEGKEIPVDYVSTGNNHHVAIYRDKEGNLQEQIVSFFEAVVRTQQGLPIIDKTYKQEEGWQFLFTMKQNEMFVFPNEATGFNPAEIDLLDPKNKKQISPNLFRVQKIATKDYFFRHHLETNVETDNVLKNTTWKREGLSGLKDIVKVRINHLGDIVSIGEY

SEQ ID NO: 915 - protein, 1426 aa, Capnocytophaga sp.
MKNILGLDLGTTSIGFTHIVEDENKEKSEIKELGVRIVSLTTDEQSDFEKGKSISTNANRTLKHGARLNLDRYQQRRKFLIDLLQKANLITSSSILAENGKNTTHSTWQLRAKAVTERIEKEEFARVLLAINKKRGYKSSRKAKTEDEGQAIDGMAIAKRLYDENLTPGQLSLQLLQQNKKLLPDFYRSDLQKEFDLVWNFQKQFYPDILTDSFYKELQGKGKDATSKAFSKRYHFDTAENKGSRESVRLQAYQWRAEAISKQLSKEEVAYVLTEINNNLNNASGYLGAISDRSKELYFNRQTVGQYLYAQLQENKHNSLKNKVFYRQDYLDEFERIWETQASFHKELTEELKKQIRDVVIFYQRKLKSQKGLISFCEFESKEIEIEKDGKTITKSIGARVVPKSSPLFQEFKIWQILNNVTCKRKGIRKKKSSAKSTELDLFNEPSQTIFSLDMECKQLLFEELNLKGDLKSDKVLKLLGYSPQEWEINYNQLEGNRTQKALYEAYLKIVEMEAHDVKDILQIKSTKDDWALEESPLSASEIRERVKAIFQTLGICTKILYFDPLLPVKEFEEQDSYQLWHLLYSYESDDSTSGNETLYRILEKKYAFKREHATILANVTLQDDYGSLSTKAIRKIYPYIKENQYSTACEKAGYKHSKLSLTTEELEARELKNIIPLLKKNALRNPVVEKILNQMINVVNALIEKNSERDAEGKITKYFHFDEIRIELARELKKNAQERYEMTQNINKAKLEHQKISGILQKEFGIKNPTKSDITRYRLYQELAHNGYNDLYTNTYIPKELLFSKNIDIEHIVSKARVFDDSFSNKTLAFREFNIKKGESTAFDYITSLNNEEELNQYLNRVENAYKTKNISPAKYKNLLKKASEIGDGFINRDLRDTQYIAKKAKEILFQVTKNVLSTSGSITDRLREDWGLVDVMKELNMPKYQSLGLTEVEERKEGNKVTVIKNWTKRNDHRHHAMDALTVAFTKPSYIQYLNHLNARKDKNNKNYSVILAIEEKETIKVPTNNGKNKRVFIEPIPNFRQVAKKHLEEIFISHKAKNKVVTKNTNKPAGTDKQQITLTPRGQLHKETVYGKYQYYVNKEEKIGVKFDKETIAKVSNPVYREALLKRLQANDNDPKKAFAGKNALSKNPIYLDEAKTKTLTEKVNLTYLEEDFSIRKDISPDNFKDLKSIEKVIDQGVKRILIKRLQDYDNDPKKAFVDLEKNPIWLNKEKGIAIKRVTISGVNNAQPLHIGKDHLGKTTLNKEGKEIPVDYVSTGNNHHVAIYRDKEGNLQEQIVSFFEAVVGAQQGLPIVDKTYKQAEGWQFLFTMKQNEMFVFPNEATGFNPAEIDLLDPKNKKQISPNLFRVQKIATKDYFFRHHLETNVDTDNVLKNTTWKREGLSGLKDIVKVRINHLGDIVSIGEY

SEQ ID NO: 916 - protein, 1450 aa, Capnocytophaga sp.
MKRILGLDLGSNSIGWAFVEQDFENKQGKIIATGSRIIPMDQGILGDFEKGNTVSQTAERTTYRSMRRLRERHLLRRERLHRVLHILGFLPPHYDAQIDFTKRYGKFIDNAEPKIAYNNGNFIFMNSFNEMIEDFKKYQPQLFYKKSNGEESKIPYDWTIYYLRKKVLSQKITQQELAWLILHFNQKRGYYQLRGEEETENPNKEVAFHSLKVVDVEAEAPNKKGEIWYTIRLENGWIYRRTSKIPLDDWKGKTRDFIVTTDLNDDGTIKVDKEGKEKRSFRAPDENDWNLLKKKTEHDIDFSGKTVGAYIYDHLLQNPNQKIKGKLVRTIERKYYKDELKAILAKQIALQPELFTETLLADCIRELYRKNETQQQNLLSKDFLHLFVEDIIFYQRPLRSKKSTIANCTLEKRSYIDKETNERKDTFIKVCAKSNPYYQEFRVLQWLQNLRIYEIETDREVTAEFIETAEDYEALFNFLMSQKEIDNEGLLKYFLFAKNPQIKDKVAKSELKKWLTTYRWNYVYDAADNSSKKYPMNETGYDLQRYLQKVEGLPANFLTFDITYRLWHLLYSVKDKVEFEKALKKFAQEYQLDEASFVDSFKNFKPYPNEYGSFSEKAIKKLLPLMRFGNHWDFNRIDVSTQKRIDDLINGVANDEIRTIIREKAEKYQLNSESCFQGLPLWLAQYVVYNRHAEATDIEKWTSVSDLETYLEDFKQHSLRNPIVEQVVTETLRVVRDIWQQYGGGQANFFDEIHIELGRELKKTAEERKQLSNRNQENENTNLRIKKLLAELKEDASIQNVRPYSPVQQELLKIYEEGVFSSTDQVEEDIQKIRKKAEPTTPEIQRYKLWLEQKYKSPYTGEVISLTKLFTEEYEIEHIIPQSRYYDDSLSNKVICESAVNKLKTNQLGLEFIQNHHGEKVRITGNKEVTIFTEEQYKEFVKKHYANNSAKQQKLLLNEIPEKMVARQLNDTRYISKYISEILSKIVRSDEKDEGVNSKNVIPCTGKITTALKQDWGLNDVWNELILPRFERMNQLTQTQLFTSYNDRFQKNLPTVPIEYSQGFQKKRIDHRHHAMDALVIACATREHINYMNNQHALDKNKDKKEKQQSRIDLRTILCEKKNNNWQFKKPWSTFTQETKEALEHIVVSFKQNLRVINKATNYYEKWEEKNGVLVKKKVKQEGTNWAIRKPLHKETVSGKIVLDRKIGKDKILTATRKEVDITFTEKIISSITDTGIQKILLNYLNYKGSPEVAFSAEGLEELNKNIAQYNDGKKHQPIYKVRIFEEGSKFPLGETGAKATKFVEAAKGTNLFFGVYQGKEKRSYATIPLNEVIERQKQGLPSVPERNEKGEPLLFSLSPNDLVYVPMEGEIAETIDFNNLSKEQKERIYKTVSFTGNQCFFVQEAVATPIVNKMEYSPLNKMERDILGTMIKEVCIKLKVDRLGNITKA

SEQ ID NO: 917 - protein, 1437 aa, Capnocytophaga sp.
MKYIKYILGLDIGSNSIGWALIQLDLLQKTKRIIATGSRIIPMDQKVLSDFGKGITISPTAQRTSYRNARHCRERHLLRRERLHRVLHILGFLPTHYDKQIDFSKRYGKFVDNTEPKIAYNERKFLFMDSFQEMLADFKIHQPDLFYTKKNGEESKIPYDWTIYYLRKKALSRKISKEELAWIILNFNQKRGYYQLREEEEENKENDFEIISSKIISVIKKDKDKKYNKYWYDIILENGLVYQAAFYNDFVYNWINQDREFIIERISLKNGTEKVKLSYLPTFDEIDKMDKKEQDKYYKKIKIKTENSIGNKTVGCYIYDHILQNPNEKIKGKLVRTIERKYYKEELKAILEKQVALQPELFTDQLFADCIRELYSKNEAQQRNLAARDFVHLFVEDIIFYQRSLRRQKSTLANCSLESRSYIDKDSHTRKEAPLKVCPKSNPYYQEFRVLQWLQNLKIYEIDTDQEVTHEFIKTLEDKQQFFDFLMNQKEIDCEELLKYFLNQTYPNAREKALKSELKKWKDTYRWNYVYDIGEKSSKKYPMNETRYELKRHLEKVANLPDDFLSSEVEYLLWHLIYSVKDKVAYEKGLKTFAQKHHLDKDSFVESFKKFKPYPSEYGSFSEKAIRKLLPLMRFGSYWDFNHIDKNTQKRIEDLITGVENEEIRTILREKAEKYQLEKETDFQDLPLWLAQYIVYNRHAEASSLEKWTSVNDLETYLNEFKQYSLRNPIVEQVVMETLRVVRDIWQQYGQGQASFFDEIHIELGRELKKTAKEREKLSKQNQKNEDINLSIKEKLKELEKYNTRAYSITHQEKYKLWLEQKHISPYTGQIISPENLFTDNYEIEHIIPQSRFFDDSLSNKVVCESIVNKAPYKDRQLGLEFIKNQGGRIVKELSTENKTIKIFTEEQYRTFIKEHYSNNPEKTKKLLLEEIPEKMVARQMNDTCYISKFISEILSKIVRSDEQDEGVHSKNVILCTGKITSALKQDWGVNDVWNDLILPRFERMNDLTQSTLFTTYNEKYQKYLPTVPMEYSNGFQKKRIDHRHHAMDAIIIACATREHINYINNQHALEKGKDKKEKQKEHDKLREKLCIKKDNKGSEENYSWIFKKPWDTFTQEVQAALEGIVVSFKQNLRVINKATNYYERWVEENGKYIKKMVKQEGTNWAIRKPLHEETISGKIYLDREEITKNDILTATRKTVDSSFDEKRIKKITDTGIQKILLNYLKYKGSPEIAFSPEGLEELNKNLSIYNDGKPHKPIYKVRIYEKGSGRFALGEKGRKYKKYVQGAPNLYFGIYQGANKRSFATIPLNEVIERQKQGRPSIPEYNEKGDPLLFSLSPNDLVYVPVEGEIIEDIDFQNLSKEQKERIYNVNDFSSTCYFTPNRIAKAIFPKEVDLQRKGDKLPGSYDTKTASLEGIQIKEVCIKLKIDRLGNISKA

SEQ ID NO: 918 - protein, 1140 aa, Catellicoccus marimammalium
MKNMTKVNVGLDVGISSAGWSVINAETNQILESGVRLFSGSDADENVNRRNQRQGRRLFRRRKLRIQEAKKYLENVFQLKDIEPKDEWNPYEIRVRALNEKVSKEELSIALLNIVKHRGISYELEDVTDEEGTNTQSFQSGLDYNRRLLKTKTVGEIQYDRLQKYGQVRGQIQTEDGLLINIFPTKNYVEEVERILETQKKYHPEIDDVFIEKIISFVTRKREYFVGPGNEKSRTDYGIYRENGETLDNLFEILIGKDKFYPEEYRAAGSSYTAQIFNLLNDLNNLRIPTTEDHHLTKAQKEEIITELKNTSRLSGGMLKLISKVTKAPKEEISGYRKDEKDKPDLHSLAYYRKQKNMLEKEGIQIADFSEELLDELATMMTLNTEPGEIRKQLNKITNQYDILTPEVIEVLVKNHTAFVATSNHKWHRFSLKLMKEFIPELLETSKEQSTILCERGFIQNRASYLDENHHFNYAELRENLYNPVVRKSTCEMLKVFTAIQEKYPNIQNVIVELPRETNEDEQKRKIKKINDNNAKRKKEILKEAQAQSGLSEEALEEKLLKTKGLYLKLMLWYEQEGKCVYSGQEIPLSDLLQNKGGYEVDHIIPISISFDDRLCNKVLVRQQLNSQKSNQTPFEYMTTHTDGHLSFHELKELVGKNKRFSKEKRELLLAEIYSNDIETRKRFINRNLVDTSYTARIVLNALQQYKKENQLSMNVSVVRGAMTNILRKKVKLDKTRETFHHHAIDASLMAVIPNIEFFKERKEWLPKSANEEVVEVEVSEEETMPEKEFKVKMRLPESFIQDVQILQRNSFAKEEVSGPQTRERNLKIKFSHQVDQKMNRKVADDTIYGTRQAQLGKDKKEETYVIGKIKDIYNYDEYVRFKKRYDKNKESFLMYHHDPQTFEKLEEILAQYPEYIEDEKGKKKKVSPFALYREENGPVTKYAKKNNGPVIKQLKYYDSKLNRKIDISHKYSTKNRQVVLQSLKPYRTDVYRNQDTGEYTLVGIDQNDGKFVNGHYGIPKSRYEEIKANNKLSEHDEFVFSLYKNSMVKVIDENGESIVVRYLSRSMPNRKNNAEIKPVEKYQFEDGEVVPVYGKCRKQMQTVFVKKGWTLLKGNTDILGNTYFVEKESENPKKMIDDK

SEQ ID NO: 919 - protein, 1419 aa, Chryseobacterium sp.
MMIKNILGLDLGTNSIGWALIKQNFENKYGEILGMGSRIIPMSQDVLGEFGKGNSVSQTAARTGYRGVRRLRERFLLRRERLHRVLNVLNFLPEHYASQIDFEKRFGKFKYETEPKLAYNNDGFFFKNSFDEMLGDFKDHQFHLLENGRKVPYDWTIYYLRKKALSQKIEKEELAWILLNFNQKRGYYQLRGEDFEEEKDRVFVRLKVDRVVDSGENIKGKILYDVYFENGWKYEKQIVKTEDWIGRTKEFIVTESILKNGDTKRTFKAVDSEKDWIAIKTKTEQEIDKSHKTVGAYIYEALLQNPKQKIKGKLVRTIERKFYREELKKILERQKEFHPELQSDDLYNDCIRELYRNNEAHQITLSKKDFVHLLLNDLIFYQRPLRSQKSSVSNCTLEFRKYKDENGVEHAQYLKTIPKSNPYYQEFRVWQWMFNLNIYRKDDDTNVTKEFLSSTEDYETLFEFLNNRKEVDQKALLRHFKLNEKTHRWNYVEDKKYPCNETKTMISTRLEKVENYPSDFLTREMEQNIWHIIYSVNDKIEYEKALKSFAHKNNLDENSFFEAFKKFPPFKSEYGSFSEKAIKKLLPLLRLGKYWNWESIDRKSQGRIEKIITGEFDGNIKDKVREKAIHLTAENDFQGLQLWLAQYIVYGRHSEASMIGKWNSADDLEEFLKGFKQHSLRNPIVEQVITETLRVVKDIWLKYGNGAKDFFSEIHIELGREMKQTKDERVDATKRITENENTNLRIKALLAEMMNDNSVENIRPYSPMQQEILKIYEDGILKSDIEIDDDILKISKTAQPSSSDLKRYKLWLEQRYKSPYTGQIIPLNKLFTSEYEIEHIIPQSRYFDDSFSNKIICESAVNKLKDNYIGLGFIKQFGGMIVECGFGKSVEIFKAEEYEDFVKKHYANNRSKRNKLLLEEIPEKMIDRQLNDTRHISKYISGVLSNIVRQEDGTDEGVNSKNIVPGNGKITTQLKQDWGLNDVWNELILPRFERMNQLTNSTDFTSWNKNHQKFLPTVPIEFSKGFSKKRIDHRHHAMDALVIACATKDHINLLNNQSAKSDTKRYDLKRKLMKFERVVYSHSKTGEKIEKEVPKQFLKPWDNFTVDAKNKMETIIVSFKQNLRVINKATNHYEKWIEKDGIKRKELIKQEGTNWAIRKPMHKETVSGKVDLPGIKIPKGKILTATRKSLDTSFDLKTINSITDTGIQKILKNYLEFKGSSELAFSPEGIEDMNKNIEKFNDGKPHQSINKVRIFELGSKFSVGQTGNKKDKYVEAAKGTNLFFAVYEDKNGKRSYETIPLNEVIERQKQGLDSVSFKNKEDFLLCPNDLVYVPSEDELENIYNIDFKNLTTEKTGNIYKVVSFSGNQIFFIRQDIAISIVNKAEFSTLNKMERAIDGSMIKENCIKLKIDRLGNIAKI

SEQ ID NO: 920 - protein, 1065 aa, Clostridium perfringens
MNKDINYALGLDIGITSVGWAVINLDLNRIEDLGVRIFNAAENPKDGSSLALPRRLARGRRRLLRRKAYRVERVRKLIVKNNILTKEELEGLFKNKEVIDVWEARVKGLDYKLSREEWAKILINFCKRRGFKSNRKNETKDKEAGQILSSISYNIEKMKETNSRTIGEYIYNEVKNSDDSYAPLRNKFGEYKMCVSRDVLREEIHTLFEKQRELGNNFASDEIEDKYFEIFNSQRPFSNFEDLEKLVGFCTFERKKHKRAPKHCISSEEFTLYEGINKLSIIKDGEKRKLSEEERTLVVNEAFNKKEIKYTTLRKLLGLSEDELFSTLTYSIDKDISKTENTKFVSLKGYHEIKRAIEKGVSKKAWQDIENNRNLLNDIAYVLTLGKTDDEIEKQLRLRNVPEELFESLLDMSFSKFNNLSIYALEKILPFMKEGYQYNEACEKAGYNFKAIYEGVRTKKLPVIEIDEIVNPVVNRALAQTRKVINSVIDKYGSPVRINIELARDLAKNFKDRKLIEKEQKENRANLDKIRENLRELMDKEPTAVEVLKYRLWEQQRGECAYTQSQIALERLFSPGYCEIDHIIPFSRSFDDSLSNKILVLGSENQRKGNKIPYEYFGEDSERWNSFEIWVKGSYLNYKKKANLLKKKFTEEEQRDWKARNLQDTKYICRYISNFVNNRLEFKESENKQKVITVNGRATAYLRSRWGLNKVREDGDKHHALDAAVVGVTTQGMVQKISKYSKAHELYTVRKNDEFVDVETGECVDVDEYKEIRKDILPRPWRGFSEELKLRLSDNPLEELKKLPIETYNEEFIKENVKPIFVSRVPFRKISGKLFKETIYSERAFKDGYFVSKKSLVDLKRGDLDNFYNYECDKKLYDAISERMKEFNYNGKKAFESPFRKPTKSGKEGPVVRSVKIKSAAPFKDGIPMNEGLVAKEGMVRIDIYEKEGKYFVVPVYRYQLAKGIVPKRAAIAGKSELKWPIMDQTYNFKFSIFKNDLIEIKYAKKDGYFGYYDGFDRHTASLVIENHDNSDRYRGIGVKTGVVEFNKYEVDVLGNYHKVNLGGN

SEQ ID NO: 921 - protein, 1099 aa, Corynebacterium accolens
MSLSYRVGIDVGTYSLGCTAIEVDDNDQPVNILSSVSLIHDSGLDPDQQKRAVTRLASSGVARRTRRLYRRRRRRMINLEKFLTSQGWETRPFEHYSDPYLPWNARVALVNGYISDDAQRGMYLSIAFRHIANHRGWRNPYWKVSSLYSPDKPSDAFEQIRKELEESTGHKIPETVTVGQLISFAQFGKDRLRGGGKKKDEKKPQEQVNQAVISARLHQIDHAREINEICRVQKIDDALRKQILDLVFAAESPKGAQIGRVGKDPLQPKLPRALKASDAFQQYRIVALAGNLRIYRDGVSTPLDRDEKLIVFNYLINLSHKEEPSWLKVAEVLNIDRGQLHGTATMTDDGERAGAAPPVHDTNRTILGCKIKPLVHWWEGANDDERAAMLKALSNSEVEDFDSPAGAQTQAFFANLDESEQEKLDSLHLPIGRAAYSEDTLMRLTSRMLDENLDLYEARLAEFDIPKDWAPPAPRIGEPVGNPAVDRVLKGVARWLEAAADEWGAPKSVVIEHVRDGFISKSKANEIDRANNARHKRNRELFKQMQENLGIDGKLRSSDLWRYQSVQRQNCQCAYCGSPITYTTCEMDHIVPRAGEGSTNTRDNLVATCHRCNLAKKNIPFAVWAAQTNIPGVSVKEALDRTRHWSEDSGMTSKDFKKFRKNVCDRLKRTVVDEPLDARSMESVAWMANELRGRVAQRFQEENTVVNVYRGELTAEARRAAGISDKLRFIDGTGKSRLDRRHHAVDAAVVAFTQNYVAETLAIRSNKKREAQLLQAAEQWKEFTGSDAEHRAAWNAWLPKMQKLAVLLQKALDEDRIAVTSNLRLRLGNGRAHEDSIGELKTIRVGDAISVTDIDRASSEALWCALTREPDFDENNGLPENPDRRIRIHGTWYDAEDDIEVFPVGAGAIKVRGGYAELSRFHHARIYKIPGKKAPVYCMLRVYNADLIRHRHEDLFSVEIKPQTMSVRQAEPKLRKALAENTAEYLGWLVTDDELVIDTSNFNTGQIAEMQSELGQVRRWRLDGFYSPSTLRLRPLQMSAEGLREDTSIGAKKIIDRPGWLPAINKLFGEGHVTVVRRDALGRARLTSNAHLPISWKAE

SEQ ID NO: 922 - protein, 1084 aa, Corynebacterium diphtheriae
MKYHVGIDVGTFSVGLAAIEVDDAGMPIKTLSLVSHIHDSGLDPDEIKSAVTRLASSGIARRTRRLYRRKRRRLQQLDKFIQRQGWPVIELEDYSDPLYPWKVRAELAASYIADEKERGEKLSVALRHIARHRGWRNPYAKVSSLYLPDGPSDAFKAIREEIKRASGQPVPETATVGQMVTLCELGTLKLRGEGGVLSARLQQSDHAREIQEICRMQEIGQELYRKIIDVVFAAESPKGSASSRVGKDPLQPGKNRALKASDAFQRYRIAALIGNLRVWVDGEKRILSVEEKNLVFDHLVNLTPKKEPEWVTIAEILGIDRGQLIGTATMTDDGERAGARPPTHDTNRSIVNSRIAPLVDWWKTASALEQHAMVKALSNAEVDDFDSPERAKVQAFFADLDDDVHAKLDSLHLPVGRAAYSEDTLVRLTRRMLSDGVDLYTARLQEFGIEPSWTPPTPRIGEPVGNPAVDRVLKTVSRWLESATKTWGAPERVIIEHVREGFVTEKRAREMDGDMRRRAARNAKLFQEMQEKLNVQGKPSRADLWRYQSVQRQNCQCAYCGSPITFSNSEMDHIVPRAGQGSTNTRENLVAVCHRCNQSKGNTPFAIWAKNTSIEGVSVKEAVERTRHWVTDTGMRSTDFKKFTKAVVERFQRATMDEEIDARSMESVAWMANELRSRVAQHFASHGTTVRVYRGSLTAEARRASGISGKLEFLDGVGKSRLDRRHHAIDAAVIAFTSDYVAETLAVRSNLKQSQAHRQEAPQWREFTGKDAEHRATWRVWCQKMEKLSALLTEDLRDDRVVVMSNVRLRLGNGSAHEETIGKLSKVKLGSQLSVSDIDKASSEALWCALTREPDFDPKDGLPANPERHIRVNGTHVYAGDNIGLFPVSAGSIALRGGYAELGSSFHHARVYKITSGKKPAFAMLRVYTIDLLPYRNQDLFSVELKPQTMSMRQAEKKLRDALATGNAEYLGWLVVDDELVVDTSKIATDQVKAVEAELGTIRRWRVDGFFGDTRLRLRPLQMSKEGIKKESAPELSKIIDRPGWLPAVNKLFSEGNVTVVRRDSLGRVRLESTAHLPVTWKVQ

SEQ ID NO: 923 - protein, 1084 aa, Corynebacterium diphtheriae
MKYHVGIDVGTFSVGLAAIEVDDAGMPIKTLSLVSHIHDSGLDPDEIKSAVTRLASSGIARRTRRLYRRKRRRLQQLDKFIQRQGWPVIELEDYSDPLYPWKVRAELAASYIADEKERGEKLSVALRHIARHRGWRNPYAKVSSLYLPDGPSDAFKAIREEIKRASGQPVPETATVGQMVTLCELGTLKLRGEGGVLSARLQQSDHAREIQEICRMQEIGQELYRKIIDVVFAAESPKGSASSRVGKDPLQPGKNRALKASDAFQRYRIAALIGNLRVRVDGEKRILSVEEKNLVFDHLVNLAPKKEPEWVTIAEILGIDRGQLIGTATMTDDGERAGARPPTHDTNRSIVNSRIAPLVDWWKTASALEQHAMVKALSNAEVDDFDSPEGAKVQAFFADLDDDVHAKLDSLHLPVGRAAYSEDTLVRLTRRMLADGVDLYTARLQEFGIEPSWTPPAPRIGEPVGNPAVDRVLKTVSRWLESATKTWGAPERVIIEHVREGFVTEKRAREMDGDMQRRAARNAKLFQEMQEKLNVQGKPSRADLWRYQSVQRQNCQCAYCGSPITFSNSEMDHIVPRAGQGSTNTRENLVAVCHRCNQSKGNTPFAIWAKNTSIEGVSVKEAVERTRHWVTDTGMRSPDFKKFTKAVVERFQRATMDEEIDARSMESVAWMANELRSRVAQHFASHGTTVRVYRGSLTAEARRASGISGKLKFFDGVGKSRLDRRHHAIDAAVIAFTSDYVAETLAVRSNLKQSQAHRQEAPQWREFTGKDAEHRAAWRVWCQKMEKLSALLTEDLRDDRVVVMSNVRLRLGNGSAHKETIGKLSKVKLGSQLSVSDIDKASSEALWCALTREPDFDPKEGLPANPERHIRVNGTHVYAGDNIGLFPVSAGSIALRGGYAELGSSFHHARVYKITSGKKPAFAMLRVYTIDLLPYRNQDLFSVELKPQTMSMRQAEKKLRDALATGNAEYLGWLVVDDELVVDTSKIATDQVKAVEAELGTIRRWRVDGFFSPSKLRLRPLQMSKEGIKKESAPELSKIIDRPGWLPAVNKLFSDGNVTVVRRDSLGRVRLESTAHLPVTWKVQ

SEQ ID NO: 924 - protein, 1084 aa, Corynebacterium diphtheriae
MKYHVGIDVGTFSVGLAAIEVDDAGMPIKTLSLVSHIHDSGLDPDKIKSAVTRLASSGIARRTRRLYRRKRRRLQQLDKFIQRQGWPVIELEDYSDPLYPWKVRAELAASYIADEKERGEKLSVALRHIARHRGWRNPYAKVSSLYLPDEPSDAFKAIREEIKRASGQPVPETATVGQMVTLCELGTLKLRGEGGVLSARLQQSDHAREIQEICRMQEIGQELYRKIIDVVFAAESPKGSASSRVGKDPLQPGKNRALKASDAFQRYRIAALIGNLRVRVDGEKRILSVEEKNLVFDHLVNLAPKKEPEWVTIAEILGIDRGQLIGTATMTDDGERAGARPPTHDTNRSIVNSRIAPLVDWWKTASALEQHAMVKALSNAEVDDFDSPEGAKVQAFFADLDDDVHAKLDSLHLPVGRAAYSEDTLVRLTRRMLADGVDLYTARLQEFGIEPSWTPPAPRIGEPVGNPAVDRVLKTVSRWLKSATKTWGAPERVIIEHVREGFVTEKRAREMDGDMRRRAARNAKLFQEMQEKLNVQGKPSRADLWRYQSVQRQNCQCAYCGSPITFSNSEMDHIVPRAGQGSTNTRENLVAVCHRCNQSKGNTPFAIWAKNTSIEGVSVKEAVERTRHWVTDTGMRSTDFKKFTKAVVERFQRATMDEEIDARSMESVAWMANELRSRVAQHFASHGTTVRVYRGSLTAEARRASGISGKLEFLDGVGKSRLDRRHHAIDAAVIAFTSDYVAETLAVRSNLKQSQAHRQEAPQWREFTGKDAEHRAAWRVWCQKMEKLSALLTEDLRDDRVVVMSNVRLRLGNGSAHEETIGKLSKVKLGSQLSVSDIDKASSEALWCALTREPDFDPKDGLPANPERHIRVNGTHVYAGDNIGLFPVSAGSIALRGGYAELGSSFHHARVYKITSGKKPAFAMLRVYTIDLLPYRNQDLFSVELKPQTMSMRQAEKKLRDALATGNAEYLGWLVVDDELVVDTSKIATDQVKAVEAELGTIRRWRVDGFFGDTRLRLRPLQMSKEGIKKESAPELSKIIDRPGWLPAVNKLFSEGNVTVVRRDSLGRVRLESTAHLPVTWKVQ

SEQ ID NO: 925 - protein, 1084 aa, Corynebacterium diphtheriae
MKYHVGIDVGTFSVGLAAIEVDDAGMPIKTLSLVSHIHDSGLDPDKIKSAVTRLASSGIARRTRRLYRRKRRRLQQLDKFIQRQGWPVIELEDYSDPLYPWKVRAELAASYIADEKERGEKLSVALRHIARHRGWRNPYAKVSSLYLPDEPSDAFKAIREEIKRASGQPVPETATVGQMVTLCELGTLKLRGEGGVLSARLQQSDHAREIQEICRMQEIGQELYRKIIDVVFAAESPKGSASSRVGKDPLQPGKNRALKASDAFQRYRIAALIGNLRVRVDGEKRILSVEEKNLVFDHLVNLAPKKEPEWVTIAEILGIDRGQLIGTATMTDDGERAGARPPTHDTNRSIVNSRIAPLVDWWKTASALEQHAMVKALSNAEVDDFDSPEGAKVQAFFADLDDDVHAKLDSLHLPVGRAAYSEDTLVRLTRRMLADGVDLYTARLQEFGIEPSWTPPAPRIGEPVGNPAVDRVLKTVSRWLESATKTWGAPERVIIEHVREGFVTEKRAREMDGDMRRRAARNAKLFQEMQEKLNVQGKPSRADLWRYQSVQRQNCQCAYCGSPITFSNSEMDHIVPRAGQGSTNTRENLVAVCHRCNQSKGNTPFAIWAKNTSIEGVSVKEAVERTRHWVTDTGMRSTDFKKFTKAVVERFQRATMDEEIDARSMESVAWMANELRSRVAQHFASHGTTVRVYRGSLTAEARRASGISGKLEFLDGVGKSRLDRRHHAIDAAVIAFTSDYVAETLAVRSNLKQSQAHRQEAPQWREFTGKDAEHRAAWRVWCQKMEKLSALLTEDLRDDRVVVMSNVRLRLGNGSAHEETIGKLSKVKLGSQLSVSDIDKASSEALWCALTREPDFDPKDGLPANPERHIRVNGTHVYAGDNIGLFPVSAGSIALRGGYAELGSSFHHARVYKITSGKKPAFAMLRVYTIDLLPYRNQDLFSVELKPQTMSMRQAEKKLRDALATGNAEYLGWLVVDDELVVDTSKIATDQVKAVEAELGTIRRWRVDGFFGDTRLRLRPLQMSKEGIKKESAPELSKIIDRPGWLPAVNKLFSEGNVTVVRRDSLGRVRLESTAHLPVTWKVQ

SEQ ID NO: 926 - protein, 1084 aa, Corynebacterium diphtheriae
MKYHVGIDVGTFSVGLAAIEVDDAGMPIKTLSLVSHIHDSGLDPDKMKSAVTRLASSGIARRTRRLYRRKRRRLQQLDKFIQRQGWPVIELEDYSDPLYPWKVRAELAASYIADEKERGEKLSVALRHIARHRGWRNPYAKVSSLYLPDEPSDAFKSIREEIKRASGQPVPETATVGQMVTLCELGTLKLRGEGGVLSARLQQSDHAREIQEICRMQEIGQELYRKIIDVVFAAESPKGSASSRVGKDPLQPGKNRALKASDSFQRYRIAALISNLRVRVDGEKRILSVEEKNLVFDHLVNLAPKKEPEWVTIAEILGIDRGQLIGTATMTDDGERAGARPPTHDTNRSIVNSRIAPLVDWWKTASALEQHAMVKALSNAEVDDFDSPEGAKVQAFFADLDDDVHAKLDSLHLPVGRAAYSEDTLVRLTRRMLADGVDLYTARLQEFGIEPSWTPPAPRIGEPVGNPAVDRVLKTVSRWLESATKTWGAPERVIIEHVRDGFVTEKRAREMDGDMRRRAARNAKLFQEMQEKLNVQGKPSRADLWRYQSVQRQNCQCAYCGSPITFSNSEMDHIVPRAGQGSTNTRENLVAVCHRCNQSKGNTPFAIWAKNTSIEGVSVKEAVERTRHWVTDTGMRSTDFKKFTKAVVERFQRATMDEEIDARSMESVAWMANELRSRVAQHFASHGTTVRVYRGSLTAEARRASGISGKLEFLDGVGKSRLDRRHHAIDAAVIAFTSDYVAETLAVRSNLKQSQAHRQEAPQWREFTGKDAEHRAAWRVWCQKMEKLSALLTEDLRDDRVVVMSNVRLRLGNGSAHEETIGKLSKVKLGSQLSVSDIDKASSEALWCALTREPDFDPKDGLPANPERHIRVNGTHVYAGDNIGLFPVSAGSIALRGGYAELGSSFHHARVYKITSGKKPAFAMLRVYTIDLLPYRNQDLFSVELKPQTMSMRQAEKKLRDALATGNAEYLGWLVVDDELVVDTSKIATDQVKAVEAELGTIRRWRVDGFFGDTRLRLRPLQMSKEGIKKELAPELSKIIDRPGWLPAVNKLFSEGNVTVVRRDSLGRVRLESTAHLPVTWKVQ

SEQ ID NO: 927 - protein, 1084 aa, Corynebacterium diphtheriae
MKYHVGIDVGTFSVGLAAIEVDDAGMPIKTLSLVSHIHDSGLDPDKMKSAVTRLASSGIARRTRRLYRRKRRRLQQLDKFIQRQGWPVIELEDYSDPLYPWKVRAELAASYIADEKERGEKLSVALRHIARHRGWRNPYAKVSSLYLPDEPSDAFKSIREEIKRASGQPVPETATVGQMVTLCELGTLKLRGEGGVLSARLQQSDHAREIQEICRMQEIGQELYRKIIDVVFAAESPKGSASSRVGKDPLQPGKNRALKASDAFQRYRIAALIGNLRVRVDGEKRILSVEEKNLVFDHLVNLAPKKEPEWVTIAEILGIDRGQLIGTATMTDDGERAGARPPTHDTNRSIVNSRIAPLVDWWKTASALEQHAMVKALSNAEVDDFDSPEGAKVQAFFADLDDDVHAKLDSLHLPVGRAAYSEDTLVRLTRRMLADGVDLYTARLQEFGIEPSWTPPAPRIGEPVGNPAVDRVLKTVSRWLESATKTWGAPERVIIEHVREGFVTEKRAREMDGDMRRRAARNAKLFQEMQEKLNVQGKPSRADLWRYQSVQRQNCQCAYCGSPITFSNSEMDHIVPRAGQGSTNTRENLVAVCHRCNQSKGNTPFAIWAKNTSIEGVSVKEAVERTRHWVTDTGMRSTDFKKFTKAVVERFQRATMDEEIDARSMESVAWMANELRSRVAQHFASHGTTVRVYRGSLTAEARRASGISGKLEFLDGVGKSRLDRRHHAIDAAVIAFTSDYVAETLAVRSNLKQSQAHRQEAPQWREFTGKDAEHRAAWRVWCQKMEKLSALLTEDLRDDRVVVMSNVRLRLGNGSAHEETIGKLSKVKLGSQLSVSDIDKASSEALWCALTREPDFDPKDGLPANPERHIRVNGTHVYAGDNIGLFPVSAGSIALRGGYAELGSSFHHARVYKITSGKKPAFAMLRVYTIDLLPYRNQDLFSVELKPQTMSMRQAEKKLRDALATGNAEYLGWLVVDDELVVDTSKIATDQVKAVEAELGTIRRWRVDGFFGDTRLRLRPLQMSKEGIKKESAPELSKIIDRPGWLPAVNKLFSEGNVTVVRRDSLGRVRLESTAHLPVTWKVQ

SEQ ID NO: 928 - protein, 1084 aa, Corynebacterium diphtheriae
MKYHVGIDVGTFSVGLAAIEVDDAGMPIKTLSLVSHIHDSRLDPDKIKSAVTRLASSGIARRTRRLYRRKRRRLQQLDKFIQRQGWPVIELEDYSDPLYPWKVRAELAASYIADEKERGEKLSVALRHIARHRGWRNPYAKVSSLYLPDEPSDAFKAIREEIKRASGQPVPETATVGQMVTLCELGTLKLRGEGGVLSARLQQSDHAREIQEICRMQEIGQELYRKIIDVVFAAESPKGSASSRVGKDPLQPGKNRALKASDAFQRYRIAALIGNLRVRVDGEKRILSVEEKNLVFDHLVNLAPKKEPEWVTIAEILGIDRGQLIGTATMTDDGERAGARPPTHDTNRSIVNSRIAPLVDWWKTASALEQHAMVKALSNAEVDDFDSPEGAKVQAFFADLDDDVHAKLDSLHLPVGRAAYSEDTLVRLTRRMLADGVDLYTARLQEFGIEPSWTPPAPRIGEPVGNPAVDRVLKTVSRWLESATKTWGAPERVIIEHVREGFVTEKRAREMDGDMRRRAARNAKLFQEMQEKLNIQGKPSRADLWRYQSVQRQNCQCAYCGSPITFSNSEMDHIVPRAGQGSTNTRENLVAVCHRCNQSKGNTPFAIWAKNTSIEGVSVKEAVERTRHWVTDTGMRSTDFKKFTKAVVERFQRVTMDEEIDARSMESVAWMANELRSRVAQHFASRGTTVRVYRGSLTAEARRASGISGKLEFLDGVGKSRLDRRHHAIDAAVIAFTSDYVAETLAVRSNLKQSQAHRQEAPQWREFTGKDAEHRAAWRVWCQKMEKLSALLTEDLRDDRVVVMSNVRLRLGNGSAHEETIGKLSKVKLGSQLSVSDIDKASSEALWCALTREPDFDPKDGLPANPERHIRVNGTHVYAGDNIGLFPVSAGSIALRGGYAELGSSFHHARVYKITSGKKPAFAMLRVYTIDLLPYRNQDLFSVELKPQTMSMRQAEKKLRDALATGNAEYLGWLVVDDELVVDTSKIATDQVKAVEAELGTIRRWRVDGFFGDTRLRLRPLQMSKEGIKKESAPELSKIIDRPGWLPAVNKLFSEGNVTVVRRDSLGRVRLESTAHLPVTWKVQ

SEQ ID NO: 929 - protein, 1069 aa, Corynebacterium matruchotii
MAAIAIDDDGKPTEILSAISLIHDSGVDPDSAKSAATRLATSGIARRTRRLYRRKRKRLAKLDKFISSQGWPLKEFEKYEDPFYPWRVRAELATTAITDQQELGEKLSIALRHIARHRGWRNPYSKVTALYTVTEPSDAFLAMQEECAKQLGRTIPETITVGQLVTGMNLGKTRLRGENSLLAARPRQSDNANEIHTIAKVQGLSNELVRQIIDHVFAAESPKGSAAEQVGKDPLQPTKKRALKASDAFQQYRIAALIGNLRIRGGKGNRRLTTEETRLVFDYLRSLPAKQEPTWQLVAEQLKIDRGNLVGTAIMTDDGERAGAKPPVHDTNRIMENTKIKPLATWWKSADADARAAMVKALSNAEVDDFDSQAGAQVQEFFFGISDEDQEKLDGLHLPIGRAAYSEDTLDRLTKRMIGEGMDLYEARQAEFKISNDWAPPAPEIGERVGNPAVDRVLKATARWLNAAERQWGAPKSVNIEHVRAAFMSESSARELDRDNQQRAKRNVKVVAEMQEKLGIEGRPSRADVWRFQSIQRQNGKCAYCGAEISFKNSEMDHIIPQVGEGSTNTRDNLVAVCRECNSSKSNIAFAVWAENTSRPGVSVQKAIERTHHWVTDSGLRKPEFDKFRKQVCDRLRRKATDEPIDARSLESVAWMANELRSRIAQKFKDGDTKVRVYKGALTAEARRASGISGKLEFVDGKGKSRLDRRHHAVDAAVVAFTSNYVAETLALRSNMKFDQELRRKAPQWREFTGSDHVHQVEWTKWKYRMQALAELLNNALVQDRIVVMHNLRLRLGNGAAHEDTIGKLTRLKVGDAISTTDIDRASSEALWCALTRDPDYDPKTGLPENPNRTIRIHGTHLTASDEITVFPVAAASIPIRDGFAKLGSNYHHVRLFRVPSGKKYKYCLMQVYTVDLLKFRKEDLFTVELKPQTISVRTCEALLRKALANGTAEYLGWLVSDDELLIDTSSFDTPGIVKLREEYGPVNRWRLAGLTSVTRLNLRPLYLSKEGLKPNVNPEIKKIIDNRSWIITVNKLFSSGHVKIIRRDALGRPRLHSAAHLPICWEVK

SEQ ID NO: 930 - protein, 210 aa, Diplosphaera colitermitum
MSDILDKPIVLSLNRAWQVIGHRTVKQALVALNGGNADLPPALGLDIAYPKFDDGAWNFDRPLFLNPLPWSEWIELPVRDFDFAITTPRLRIRVPTVIVATQFAKMPVRIPRLTREAIFERDGGVCQYTGEHVGKHGGNLDHVVPRDRGGRDSFENLVWAKREINSLKANRLPHEAGLRLLRRPKAPAPLPASMTIREARHPDWRHFLTP

SEQ ID NO: 931 - protein, 1332 aa, Dolosigranulum pigrum
MQKNYTIGLDIGTNSVGWAVMKDDYTLIRKRMKVLGNTDIKKIKKNFWGVRLFDEGETAKETRLKRGTRRRYQRRRNRLIYLQDIFQQPMLAIDENFFHRLDDSFFVPDDKSYDRHPIFGSLEEEVAYHNTYPTIYHLRKHLADNPEKADLRLVYTALAHIVKYRGHFLIEGELNTENTSISETFEQFLDTYSDIFKEQLVGDISKVEEILSSKQSRSRKHEQIMALFPNENKLGNFGRFMMLIVGNTSNFKPVFDLDDEYKLKLSDETYEEDLDTLLGMTDDVFLDVFMAAKNVYDAVEMSAIISTDTGNSKAVLSNQMINFYDEHKVDLAQLKQFFKTHLPDKYYECFSDPSKNGYAGYIDGKTNQEDFYKYIEKVMKTIKSDKKDYFLDKIDREVFLRKQRSFYNSVIPHQIHLQEMQAILDRQSQYYPFLAENRDKIESLVTFRIPYYVGPLTVSDQSEFAWMERQSDEPIRPWNFDEIVNKERSAEKFIERMTNMDTYLLEEKVLPKRSLLYQTFEVYNELTKVRYTNEQGKTEKLNRQQKAEIIETLFKQKNRVREKDIANYLEQYGYVDGTDIKGVEDKFNASLSTYNDLAKIDGAKAYLDDPEYADVWEDIIKILTIFEDKAMRKKQLQTYSDTLSPEILKKLERKHYTGWGRFSKKLINGLRDEGSNKTILDYLKSDEGSSGPTNRNFMQLIRDNTLSFKKKIEDAQTIEDTTHIYDTVAELPGSPAIKKGIRQALKIVEEIIDIIGYEPENIVVEMARESQTTKKGKDLSKERLEKLTEAIKEFDGPSDVKVKDLKNENLRNDRLYLYYLQNGRDMYTNEPLDINNLSKYDIDHIIPQSFTTDNSIDNKVLVSRTKNQGNKSDDVPSINIVHKMKPFWRQLHKAGLISDRKFKNLTKAEHGGLTEADRAHFLNRQLVETRQITKHVANLLDSQYNTAEEQRINIVLLKSSMTSRFRKEFKLYKVREINDYHHGHDAYLNAVVATTIMKVYPNLKPQFVYGQYKKTSMFKEEKATARKHFYSNITKFFKKEKVVNEETGEILWDTERHLSTIKRVLSWKQMNIVKKVEKQKGQLWKETIYPKGDSSKLIPVKEGMDPQKYGGLSQVSEAFAVVITHEKGKKKQLKSDLISIPIVDQKAYEQHPTAYLEEAGYNNPTVLHELFKYQLFELEDGSRRMIASAKEFQKGNQMVLPLELVELLYHANRYDKVKFPDSIEYVHDNLAKFDDLLEYVIDFSNKYINADKNVQKIQKIYKEHGTEDVELTVESFVNLMTFTAMGAPATFKFYGESITRSRYTSITEFRGSTLIFQSITGLYETRYKLEDN

SEQ ID NO: 932 - protein, 921 aa, Enterococcus faecalis
MIPHQIHLAELQAIIHRQAAYYPFLKENQEKIEQLVTFRIPYYVGPLSKGDASTFAWLKRQSEEPIRPWNLQETVDLDQSATAFIERMTNFDTYLPSEKVLPKHSLLYEKFMVFNELTKISYTDDRGIKANFSGKEKEKIFDYLFKTRRKVKKKDIIQFYRNEYNTEIVTLSGLEEDQFNASFSTYQDLLKCGLTRAELDHPDNAEKLEDIIKILTIFEDRQRIRTQLSTFKGQFSAEVLKKLERKHYTGWGRLSKKLINGIYDKESGKTILGYLIKDDGVSKHYNRNFMQLINDSQLSFKNAIQKAQSSEHEETLSETVNELAGSPAIKKGIYQSLKIVDELVAIMGYAPKRIVVEMARENQTTSTGKRRSIQRLKIVEKAMAEIGSNLLKEQPTTNEQLRDTRLFLYYMQNGKDMYTGDELSLHRLSHYDIDHIIPQSFMKDDSLDNLVLVGSTENRGKSDDVPSKEVVKDMKAYWEKLYAAGLISQRKFQRLTKGEQGGLTLEDKAHFIQRQLVETRQITKNVAGILDQRYNANSKEKKVQIITLKASLTSQFRSIFGLYKVREVNDYHHGQDAYLNCVVATTLLKVYPNLAPEFVYGEYPKFQTFKENKATAKAIIYTNLLRFFTEDEPRFTKDGEILWSNSYLKTIKKELNYHQMNIVKKVEVQKGGFSKESIKPKGPSNKLIPVKNGLDPQKYGGFDSPIVAYTVLFTHEKGKKPLIKQEILGITIMEKTRFEQNRILFLEEKGFLRPRVLMKLPKYTLYEFPEGRRRLLASAKEAQKGNQMVLPEHLLTLLYHAKQCLLPNQSESLTYVEQHQPEFQEILERVVDFAEVHTLAKSKVQQIVKLFEANQTADVKEIAASFIQLMQFNAMGAPSTFKFFQKDIERARYTSIKEIFDATIIYQSTTGLYETRRKVVD

SEQ ID NO: 933 - protein, 1337 aa, Enterococcus faecalis; identical to SEQ ID NO: 110

SEQ ID NO: 934 - protein, 1337 aa, Enterococcus faecalis
MKKDYVIGLDIGTNSVGWAVMTEDYQLVKKKMPIYGNTEKKKIKKNFWGVRLFEEGHTAEDRRLKRTARRRISRRRNRLRYLQAFFEEAMTALDENFFARLQESFLVPEDKKWHRHPIFAKLEDEVAYHETYPTIYHLRKKLADSSEQADLRLIYLALAHIVKYRGHFLIEGKLSTENISVKEQFQQFMIIYNQTFVNGESRLVSAPLPESVLIEEELTEKASRTKKSEKVLQQFPQEKANGLFGQFLKLMVGNKADFKKVFGLEEEAKITYASESYEEDLEGILAKVGDEYSDVFLAAKNVYDAVELSTILADSDKKSHAKLSSSMIVRFTEHQEDLKNFKRFIRENCPDEYDNLFKNEQKDGYAGYITHAGKVSQLKFYQYVKKIIQDIAGAEYFLEKIAQENFLRKQRTFDNGVIPHQIHLAELQAIIHRQAAYYPFLKENQEKIEQLVTFRIPYYVGPLSKGDANTFAWLKRQSEEPIRPWNLQETVDLDQSATAFIERMTNFDTYLPSEKVLPKHSLLYEKFMVFNELTKISYTDDRGIKANFSGKEKEKIFDYLFKTRRKVKKKDIIQFYRNEYNTEIVTLSGLEEDQFNASFSTYQDLLKCGLTRAELDHPDNAEKLEDIIKILTIFEDRQRIRTQLSTFKGQFSAEVLKKLERKHYTGWGRLSKKLINGIYDKESGKTILDYLIKDDGVSKHYNRNFMQLINDSQLSFKNAIQKAQSSEHEETLSETVNELAGSPAIKKGIYQSLKIVDELVAIMGYAPKRIVVEMARENQTTSTGKRRSIQRLKIVEKAMAEIGSNLLKEQPTTNEQLRDTRLFLYYMQNGKDMYTGDELSLHRLSHYDIDHIIPQSFMKDDSLDNLVLVGSTENRGKSDDVPSKEVVKDMKAYWEKLYAAGLISQRKFQRLTKGEQGGLTLEDKAHFIQRQLVETRQITKNVAGILDQRYNAKSKEKKVQIITLKASLTSQFRSIFGLYKVREVNDYHHGQDAYLNCVVATTLLKVYPNLAPEFVYGEYPKFQTFKENKATAKAIIYTNLLRFFTEDEPRFTKDGEILWSNSYLKTIKKELNYHQMNIVKKVEVQKGGFSKESIKPKGPSNKLIPVKNGLDPQKYGGFDSPIVAYTVLFTHEKGKKPLIKQEILGITIMEKTRFEQNPILFLEEKGFLRPRVLMKLPKYTLYQFPEGRRRLLASAKEAQKGNQMVLPEHLLTLLYHAKQCLLPNQSESLAYVEQHQPEFQEILERVVDFAEVHTLAKSKVQQIVKLFEANQTADVKEIAASFIQLMQFNAMGAPSTFKFFQKDIERARYTSIKEIFDATIIYQSTTGLYETRRKVVD

SEQ ID NO: 935 - protein, 1337 aa, Enterococcus faecalis
MKKDYVIGLDIGTNSVGWAVMTEDYQLVKKKMPIYGNTEKKKIKKNFWGVRLFEEGHTAEDRRLKRTARRRISRRRNRLRYLQAFFEEAMTALDENFFARLQESFLVPEDKKWHRHPIFAKLEDEVAYHETYPTIYHLRKKLADSSEQADLRLIYLALAHIVKYRGHFLIEGKLSTENISVKEQFQQFMIIYNQTFVNGESRLVSTPLPESVLIEEELTEKASRTKKSEKVLQQFPQEKANGLFGQFLKLMVGNKADFKKVFGLEEEAKITYASESYEEDLEGILAKVGDEYSDVFLAAKNVYDAVELSTILADSDKKSHAKLSSSMIVRFTEHQEDLKNFKRFIRENCPDEYDNLFKNEQKDGYAGYITHAGKVSQLKFYQYVKKIIQDIAGAEYFLEKIAQENFLRKQRTFDNGVIPHQIHLAELQAIIHRQAAYYPFLKENQEKIEQLVTFRIPYYVGPLSKGDASTFAWLKRQSEEPIRPWNLQETVDLDQSATAFIERMTNFDTYLPSEKVLPKHSLLYEKFMVFNELTKISYTDDRGIKANFSGKEKEKIFDYLFKTRRKVKKKDIIQFYRNEYNTEIVTLSGLEEDQFNASFSTYQDLLKCGLTRAELDHPDNAEKLEDIIKILTIFEDRQRIRTQLSTFKGQFSAEVLKKLERKHYTGWGRLSKKLINGIYDKESGKTILDYLVKDDGVSKHYNRNFMQLINDSQLSFKNAIQKAQSSEHEETLSETVNELAGSPAIKKGIYQSLKIVDELVAIMGYAPKRIVVEMARENQTTSTGKRRSIQRLKIVEKAMAEIGSNLLKEQPTTNEQLRDTRLFLYYMQNGKDMYTGDELSLHRLSHYDIDHIIPQSFMKDDSLDNLVLVGSTENRGKSDDVPSKEVVKDMKAYWEKLYAAGLISQRKFQRLTKGEQGGLTLEDKAHFIQRQLVETRQITKNVAGILDQRYNAKSKEKKVQIITLKASLTSQFRSIFGLYKVREVNDYHHGQDAYLNCVVATTLLKVYPNLAPEFVYGEYPKFQTFKENKATAKAIIYTNLLRFFTEDEPRFTKDGEILWSNSYLKTIKKELNYHQMNIVKKVEVQKGGFSKESIKPKGPSNKLIPVKNGLDPQKYGGFDSPIVAYTVLFTHEKGKKPLIKQEILGITIMEKTRFEQNPILFLEEKGFLRPRVLMKLPKYTLYEFPEGRRRLLASAKEAQKGNQMVLPEHLLTLLYHAKQCLLPNQSESLAYVEQHQPEFQEILERVVDFAEVHTLAKSKVQQIVKLFEANQTADVKEIAASFIQLMQFNAMGAPSTFKFFQKDIERARYTSIKEIFDATIIYQSTTGLYETRRKVVD

SEQ ID NO: 936 - protein, 1337 aa, Enterococcus faecalis
MKKDYVIGLDIGTNSVGWAVMTEDYQLVKKKMPIYGNTEKKKIKKNFWGVRLFEEGHTAEDRRLKRTARRRISRRRNRLRYLQAFFEEAMTDLDENFFARLQESFLVPEDKKWHRHPIFAKLEDEVAYHETYPTIYHLRKKLADSSEQADLRLIYLALAHIVKYRGHFLIEGKLSTENISVKEQFQQFMIIYNQTFVNGESRLVSAPLPESVLIEEELTEKASRTKKSEKVLQQFPQEKANGLFGQFLKLMVGNKADFKKVFGLEEEAKITYASESYEEDLEGILAKVGDEYSDVFLAAKNVYDAVELSTILADSDKKSHAKLSSSMIVRFTEHQEDLKKFKRFIRENCPDEYDNLFKNEQKDGYAGYIAHAGKVSQLKFYQYVKKIIQDIAGAEYFLEKIAQENFLRKQRTFDNGVIPHQIHLAELQAIIHRQAAYYPFLKENQEKIEQLVTFRIPYYVGPLSKGDASTFAWLKRQSEEPIRPWNLQETVDLDQSATAFIERMTNFDTYLPSEKVLPKHSLLYEKFMVFNELTKISYTDDRGIKANFSGKEKEKIFDYLFKTRRKVKKKDIIQFYRNEYNTEIVTLSGLEEDQFNASFSTYQDLLKCGLTRAELDHPDNAEKLEDIIKILTIFEDRQRIRTQLSTFKGQFSAEVLKKLERKHYTGWGRLSKKLINGIYDKESGKTILGYLIKDDGVSKHYNRNFMQLINDSQLSFKNAIQKAQSSEHEETLSETVNELAGSPAIKKGIYQSLKIVDELVAIMGYAPKRIVVEMARENQTTSTGKRRSIQRLKIVEKAMAEIGSNLLKEQPTTNEQLRDTRLFLYYMQNGKDMYTGDELSLHRLSHYDIDHIIPQSFMKDDSLDNLVLVGSTENRGKSDDVPSKEVVKDMKAYWEKLYAAGLISQRKFQRLTKGEQGGLTLEDKAHFIQRQLVETRQITKNVAGILDQRYNANSKEKKVQIITLKASLTSQFRSIFGLYKVREVNDYHHGQDAYLNCVVATTLLKVYPNLAPEFVYGEYPKFQTFKENKATAKAIIYTNLLRFFTEDEPRFTKDGEILWSNSYLKTIKKELNYHQMNIVKKVEVQKGGFSKESIKPKGPSNKLIPVKNGLDPQKYGGFDSPIVAYTVLFTHEKGKKPLIKQEILGITIMEKTRFEQNPILFLEEKGFLRPRVLMKLPKYTLYEFPEGRRRLLASAKEAQKGNQMVLPEHLLTLLYHAKQCLLPNQSESLAYVEQHQPEFQEILERVVDFAEVHTLAKSKVQQIVKLFEANQTADVKEIAASFIQLMQFNAMGAPSTFKFFQKDIERARYTSIKEIFDATIIYQSTTGLYETRRKVVD

SEQ ID NO: 937 - protein, 936 aa, Enterococcus faecalis
MKKDYVIGLDIGTNSVGWAVMTEDYQLVKKKMPIYGNTEKKKIKKNFWGVRLFEEGHTAEDRRLKRTARRRISRRRNRLRYLQAFFEEAMTDLDENFFARLQESFLVPEDKKWHRHPIFAKLEDEVAYHETYPTIYHLRKKLADSSEQADLRLIYLALAHIVKYRGHFLIEGKLSTENISVKEQFQQFMIIYNQTFVNGESRLVSAPLPESVLIEEELTEKASRTKKSEKVLQQFPQEKANGLFGQFLKLMVGNKADFKKVFGLEEEAKITYASESYEEDLEGILAKVGDEYSDVFLAAKNVYDAVELSTILADSDKKSHAKLSSSMIVRFTEHQEDLKKFKRFIRENCPDEYDNLFKNEQKDGYAGYIAHAGKVSQLKFYQYVKKIIQDIAGAEYFLEKIAQENFLRKQRTFDNGVIPHQIHLAELQAIIHRQAAYYPFLKENQEKIEQLVTFRIPYYVGPLSKGDASTFAWLKRQSEEPIRPWNLQETVDLDQSATAFIERMTNFDTYLPSEKVLPKHSLLYEKFMVFNELTKISYTDDRGIKANFSGKEKEKIFDYLFKTRRKVKKKDIIQFYRNEYNTEIVTLSGLEEDQFNASFSTYQDLLKCGLTRAELDHPDNAEKLEDIIKILTIFEDRQRIRTQLSTFKGQFSAEVLKKLERKHYTGWGRLSKKLINGIYDKESGKTILGYLIKDDGVSKHYNRNFMQLINDSQLSFKNAIQKAQSSEHEETLSETVNELAGSPAIKKGIYQSLKIVDELVAIMGYAPKRIVVEMARENQTTSTGKRRSIQRLKIVEKAMAEIGSNLLKEQPTTNEQLRDTRLFLYYMQNGKDMYTGDELSLHRLSHYDIDHIIPQSFMKDDSLDNLVLVGSTENRGKSDDVPSKEVVKDMKAYWEKLYAAGLISQRKFQRLTKGEQGGLTLEDKAHFIQRQLVETR

SEQ ID NO: 938 - protein, 1337 aa, Enterococcus faecalis
MKKDYVIGLDIGTNSVGWAVMTEDYQLVKKKMPIYGNTEKKKIKKNFWGVRLFEEGHTAEDRRLKRTARRRISRRRNRLRYLQAFFEEAMTDLDENFFARLQESFLVPEDKKWHRHPIFAKLEDEVAYHETYPTIYHLRKKLADSSEQADLRLIYLALAHIVKYRGHFLIEGKLSTENISVKEQFQQFMIIYNQTFVNGESRLVSAPLPESVLIEEELTEKASRTKKSEKVLQQFPQEKANGLFGQFLKLMVGNKADFKKVFGLEEEAKITYASESYEEDLEGILAKVGDEYSDVFLAAKNVYDAVELSTILADSDKKSHAKLSSSMIVRFTEHQEDLKKFKRFIRENCPDEYDNLFKNEQKDGYAGYIAHAGKVSQLKFYQYVKKIIQDIAGAEYFLEKIAQENFLRKQRTFDNGVIPHQIHLAELQAIIHRQAAYYPFLKENQEKIEQLVTFRIPYYVGPLSKGDASTFAWLKRQSEEPIRPWNLQETVDLDQSATAFIERMTNFDTYLPSEKVLPKHSLLYEKFMVFNELTKISYTDDRGIKANFSGKEKEKIFDYLFKTRRKVKKKDIIQFYRNEYNTEIVTLSGLEEDQFNASFSTYQDLLKCGLTRAELDHPDNAEKLEDIIKILTIFEDRQRIRTQLSTFKGQFSAEVLKKLERKHYTGWGRLSKKLINGIYDKESGKTILDYLVKDDGVSKHYNRNFMQLINDSQLSFKNAIQKAQSSEHEETLSETVNELAGSPAIKKGIYQSLKIVDELVAIMGYAPKRIVVEMARENQTTSTGKRRSIQRLKIVEKAMAEIGSNLLKEQPTTNEQLRDTRLFLYYMQNGKDMYTGDELSLHRLSHYDIDHIIPQSFMKDDSLDNLVLVGSTENRGKSDDVPSKEVVKDMKAYWEKLYAAGLISQRKFQRLTKGEQGGLTLEDKAHFIQRQLVETRQITKNVAGILNQRYNANSKEKKVQIITLKASLTSQFRSIFGLYKVREVNDYHHGQDAYLNCVVATTLLKVYPNLAPEFVYGEYPKFQTFKENKATAKAIIYTNLLRFFTEDEPRFTKDGEILWSNSYLKTIKKELNYHQMNIVKKVEVQKGGFSKESIKPKGPSNKLIPVKNGLDPQKYGGFDSPVVAYTVLFTHEKGKKPLIKQEILGITIMEKTRFEQNPILFLEEKGFLRPRVLMKLPKYTLYEFPEGRRRLLASAKEAQKGNQMVLPEHLLTLLYHAKQCLLPNQSESLAYVEQHQPEFQEILERVVDFAEVHTLAKSKVQQIVKLFEANQTADVKEIAASFIQLMQFNAMGAPSTFKFFQKDIERARYTSIKEIFDATIIYQSTTGLYETRRKVVD

SEQ ID NO: 939 - protein, 1337 aa, Enterococcus faecalis
MKKDYVIGLDIGTNSVGWAVMTEDYQLVKKKMPIYGNTEKKKIKKNFWGVRLFEEGHTAEDRRLKRTARRRISRRRNRLRYLQAFFEEAMTDLDENFFARLQESFLVPEDKKWHRHPIFAKLEDEVAYHETYPTIYHLRKKLADSSEQADLRLIYLALAHIVKYRGHFLIEGKLSTENISVKEQFQQFMIIYNQTFVNGESRLVSAPLPESVLIEEELTEKASRTKKSEKVLQQFPQEKANGLFGQFLKLMVGNKADFKKVFGLEEEAKITYASESYEEDLEGILAKVGDEYSDVFLAAKNVYDAVELSTILADSDKKSHAKLSSSMIVRFTEHQEDLKKFKRFIRENCPDEYDNLFKNEQKDGYAGYIAHAGKVSQLKFYQYVKKIIQDIAGAEYFLEKIAQENFLRKQRTFDNGVIPHQIHLAELQAIIHRQAAYYPFLKENQEKIEQLVTFRIPYYVGPLSKGDASTFAWLKRQSEEPIRPWNLQETVDLDQSATAFIERMTNFDTYLPSEKVLPKHSLLYEKFMVFNELTKISYTDDRGIKANFSGKEKEKIFDYLFKTRRKVKKKDIIQFYRNEYNTEIVTLSGLEEDQFNASFSTYQDLLKCGLTRAELDHPDNAEKLEDIIKILTIFEDRQRIRTQLSTFKGQFSAEVLKKLERKHYTGWGRLSKKLINGIYDKESGKTILGYLIKDDGVSKHYNRNFMQLINDSQLSFKNAIQKAQSSEHEETLSETVNELAGSPAIKKGIYQSLKIVDELVAIMGYAPKRIVVEMARENQTTSTGKRRSIQRLKIVEKAMAEIGSNLLKEQPTTNEQLRDTRLFLYYMQNGKDMYTGDELSLHRLSHYDIDHIIPQSFMKDDSLDNLVLVGSTENLGKSDDVPSKEVVKDMKAYWEKLYAAGLISQRKFQRLTKGEQGGLTLEDKAHFIQRQLVETRQITKNVAGILDQRYNANSKEKKVQIITLKASLTSQFRSIFGLYKVREVNDYHHGQDAYLNCVVATTLLKVYPNLAPEFVYGEYPKFQTFKENKATAKAIIYTNLLRFFTEDEPRFTKDGEILWSNSYLKTIKKELNYHQMNIVKKVEVQKGGFSKESIKPKGPSNKLIPVKNGLDPQKYGGFDSPIVAYTVLFTHEKGKKPLIKQEILGITIMEKTRFEQNPILFLEEKGFLRPRVLMKLPKYTLYEFPEGRRRLLASAKEAQKGNQMVLPEHLLTLLYHAKQCLLPNQSESLAYVEQHQPEFQEILERVVDFAEVHTLAKSKVQQIVKLFEANQTADVKEIAASFIQLMQFNAMGAPSTFKFFQKDIERARYTSIKEIFDATIIYQSTTGLYETRRKVVD

SEQ ID NO: 940 - protein, 1337 aa, Enterococcus faecalis
MKKDYVIGLDIGTNSVGWAVMTEDYQLVKKKMPIYGNTEKKKIKKNFWGVRLFEEGHTAEDRRLKRTARRRISRRRNRLRYLQAFFEEAMTDLDENFFARLQESFLVPEDKKWHRHPIFAKLEDEVAYHETYPTIYHLRKKLADSSEQADLRLIYLALAHIVKYRGHFLIEGKLSTENTSVKEQFQQFMVIYNQTFVNGESRLVSAPLPESVLIEEELTEKASRTKKSEKVLQQFPQEKANGLFGQFLKLMVGNKADFKKVFGLEEEAKITYASESYEEDLEGILAKVGDEYSDVFLAAKNVYDAVELSTILADSDKKSHAKLSSSMIVRFTEHQEDLKKFKRFIRENCPDEYDNLFKNEQKDGYAGYIAHAGKVSQLKFYQYVKKIIQDIAGAEYFLEKIAQENFLRKQRTFDNGVIPHQIHLAELQAIIHRQAAYYPFLKENQEKIEQLVTFRIPYYVGPLSKGDASTFAWLKRQSEEPIRPWNLQETVDLDQSATAFIERMTNFDTYLPSEKVLPKHSLLYEKFMVFNELTKISYTDDRGIKANFSGKEKEKIFDYLFKTRRKVKKKDIIQFYRNEYNTEIVTLSGLEEDQFNASFSTYQDLLKCGLTRAELDHPDNAEKLEDIIKILTIFEDRQRIRTQLSTFKGQFSAEVLKKLERKHYTGWGRLSKKLINGIYDKESGKTILDYLVKDDGVSKHYNRNFMQLINDSQLSFKNAIQKAQSSEHEETLSETVNELAGSPAIKKGIYQSLKIVDELVAIMGYAPKRIVVEMARENQTTSTGKRRSIQRLKIVEKAMAEIGSNLLKEQPTTNEQLRDTRLFLYYMQNGKDMYTGDELSLHRLSHYDIDHIIPQSFMKDDSLDNLVLVGSTENRGKSDDVPSKKVVKKMKAYWEKLYAAGLISQRKFQRLTKGEQGGLTLEDKAHFIQRQLVETRQITKNVAGILDQRYNAKSKEKKVQIITLKASLTSQFRSIFGLYKVREVNDYHHGQDAYLNCVVATTLLKVYPNLAPEFVYGEYPKFQAFKENKATAKTIIYTNLMRFFTEDEPRFTKDSEILWSNSYLKTIKKELNYHQMNIVKKVEVQKGGFSKESIKPKGPSNKLIPVKNGLDPQKYGGFDSPVVAYTVLFTHEKGKKPLIKQEILGITIMEKTRFEQNPILFLEEKGFLRPRVLMKLPKYTLYEFPEGRRRLLASAKEAQKGNQMVLPEHLLTLLYHAKQCLLPNQSESLAYVEQHQPEFQEILERVVDFAEVHTLAKSKVQQIVKLFEANQTADVKEIAASFIQLMQFNAMGAPSTFKFFQKDIERARYTSIKEIFDATIIYQSTTGLYETRRKVVD

SEQ ID NO: 941 - protein, 1150 aa, Enterococcus faecalis
MYSIGLDLGISSVGWSVIDERTGNVIDLGVRLFSAKNSEKNLERRTNRGGRRLIRRKTNRLKDAKKILAAVGFYEDKSLKNSCPYQLRVKGLTEPLSKGEIYKVTLHILKKRGISYLDEDDTEAAKESQDYKEQVRENAQLLTKYTPGQIQLQRLKENNRVKTGINAQGNYQLNVFKVSAYANELATILKTQQAFYPNELTDDWIALFVQPGIAEEAGLIYRKRPYYHGPGNEANNSPYGRWSDFKKTGQPATNIFDKLIGKDFQGELRASGLSLSAQQYNLLNDLTNLKIDGEIPLSPEQKEYILAELMTKEFTRFGVNDVVKLLGVKKERLSGWRLDKKGKPEIHTLKGYRNWRKIFAESGIDLAMLPTETIDCLAKILTLNTEREGIENTLAFELPELAESVKLLVLDRYKELSQSVSTQAWHRFSLKTLHLLIPELMNATSEQNTLLEQFQLKSDVRKRYSEYKKLPTKDVLTEIYNPTVNKTVSQAFKVIDALLVKYGKEQIRYITIEMPRDDNEEDEKKRIKELHAKNSQRKNDSQSYFMQKSGWSQEKFQTTIQKNRRFLAKLLYYYEQDGICAYTGLSISPELLVSDSTEIDHIIPISISLDDSINNKVLVLSKANQVKGQQTPYDAWMDGSFKKINGKFSNWDDYQKWVESRHFSHKKENNLLETRNIFDSEQVEKFLARNLNDTRYASRLVLNTLQSFFANQETKVRVVNGSFTHTLRKKWGADLDKTRETHHHHAVDATLCAVTPFVKVSRYHYAVKEETGEKVMREIDFETGEIVDEMSYREFKKSKKYERKTYQVKWPNFREQLKPVNLHPRIKFSHQVDRKANRKLSDATIYSVREKTEVKTLKSGKQKITTDEYTIGKIKDIYTVDGWEAFKKKQDKLLMKDLDEKTYERLLSIAETTPDFQEVEEKNGKVKRVKRSPFAVYCEENDIPAIRKYAKKNNGPLIRSLKYYDGKLNKHINITKDSQGRPVEKTKNGRKVTLQSLKPYRYDIYQDLETKAYYTVQLYYSDLRFVEGKYGITEKEYMKKVAEQTKGQVVRFCFSLQKNDGLEIEWKDSQRYDVRFYNFQSANSINFKGLEQEMMPAENQFKQKPYNNGAINLNIAKYGKEGKKLRKFNTDILGKKHYLYYEKEPKNIIK

SEQ ID NO: 942 - protein, 1150 aa, Enterococcus faecalis
MYSIGLDLGISSVGWSVIDERTGNVIDLGVRLFSAKNSEKNLERRTNRGGRRLIRRKTNRLKDAKKILAAVGFYEDKSLKNSCPYQLRVKGLTEPLSKGEIYKVTLHILKKRGISYLDEDDTEAAKESQDYKEQVRKNAQLLTKYTPGQIQLQRLKENNRVKTGINAQGNYQLNVFKVSAYANELATILKTQQAFYPNELTDDWIALFVQPGIAEEAGLIYRKRPYYHGPGNEANNSPYGRWSDFKKTGQPATNIFDRLIGKDFQGELRASGLSLSAQQYNLLNDLTNLKIDGEIPLSPEQKEYILAELMTKEFTRFGVNDVAKLLGVKKERLSGWRLDKKGKPEIHTLKGYRNWRKIFAESGIDLATLPTETIDCLAKVLTLNTEHEGIENTLAFELPELAESVKLLVLDRYKELSQSVSTQAWHRFSLKTLHLLIPELMNATSEQNTLLEQFQLKSDVRKRYSEYKKLPTKDVLTEIYNPTVNKTVSQAFKVIDALLVKYGKEQIRYITIEMPRDDNEEDEKKRIKELHAKNSQRKNDSQSYFMQKSGWSQEKFQTTIQKNRRFLAKLLYYYEQDGICAYTGLSISPELLVSDSTEIDHIIPISISLDDSINNKVLVLSKANQVKGQQTPYDAWMDGSFKKINGKFSNWDDYQKWVESRHFSHKKENNLLETRNIFDSEQVEKFLARNLNDTRYASRLVLNTLQSFFANHETKVRVVNGSFTHTLRKKWGADLDKTRETHHHHAVDATLCAVTPFVKVSRYHYAVKEETGEKVMREIDFETGEIVDEMSYQEFKKSKKYERKTYQVKWPNFREQLKPVNLHPRIKFSHQVDRKANRKLSDATIYSVREKTEVKTLKSGKQKITTDEYTIGKIKDIYTVDGWEAFKKKQDKLLMKDLDEKTYERLLSIAETTPDFQEVEEKNGKVKRVKRSPFAVYCEENDIPAIQKYAKKNNGPLIRSLKYYDGKLNKHINITKDSQGRPVEKTKNGRKVTLQSLKPYRYDIYQDLETKAYYTVQLYYSDLRFVEGKYGITEKEYMKKVAEQTKGQVVRFCFSLQKNDGLEIEWKDSQRYDVRFYNFQSANSINFKGLEQEMMPAENQFKQKPYNNGAINLNIAKYGKEGKKLRKFNTDILGKKHYLYYEKEPKNIIK

SEQ ID NO: 943 - protein, 1150 aa, Enterococcus faecalis
MYSIGLDLGISSVGWSVIDERTGNVIDLGVRLFSAKNSEKNLERRTNRGGRRLIRRKTNRLKDAKKILAAVGFYEDKSLKNSCPYQLRVKGLTEPLSKGEIYKVTLHILKKRGISYLDEDDTEAAKESQDYKEQVRKNAQLLTKYTPGQIQLQRLKENNRVKTGINVQGNYQLNVFKVSAYANELATILKTQQAFYPNELTDDWIALFVQPGIAEEAGLIYRKRPYYHGPGNEANNSPYGRWSDFQKTGEPATNIFDKLIGKDFQGELRASGLSLSAQQYNLLNDLTNLKIDGEVPLSSEQKEYILTELMTKEFTRFGVNDVVKLLGVKKERLSGWRLDKKGKPEIHTLKGYRNWRKIFAEAGIDLATLPTETIDCLAKVLTLNTEREGIENTLAFELPELSESVKLLVLDRYKELSQSISTQSWHRFSLKTLHLLIPELMNATSEQNTLLEQFQLKSDVRKRYSEYKKLPTKDVLAEIYNPTVNKTVSQAFKVIDALLVKYGKEQIRYITIEMPRDDNEEDEKKRIKELHAKNSQRKNDSQSYFMQKSGWSQEKFQTTIQKNRRFLAKLLYYYEQDGICAYTGLPISPELLVSDSTEIDHIIPISISLDDSINNKVLVLSKANQVKGQQTPYDAWMDGSFKKINGKFSNWDDYQKWVESRHFSHKKENNLLETRNIFDSEQVEKFLARNLNDTRYASRLVLNTLQSFFTNQETKVRVVNGSFTHTLRKKWGADLDKTRETHHHHAVDATLCAVTPFVKVSRYHYAVKEETGEKVMREIDFETGEIVNEMSYREFKKSKKYERKTYQVKWPNFREQLKPVNLHPRIKFSHQVDRKANRKLSDATIYSVREKTEVKTLKSGKQKITTDEYTIGKIKDIYTLDGWEAFKKKQDKLLMKDLDEKTYERLLSIAETTPDFQEVEEKNGKVKRVKRSPFAVYCEENDIPAIQKYAKKNNGPLIRSLKYYDGKLNKHINITKDSQGRPVEKTKNGRKVTLQSLKPYRYDIYQDLETKAYYTVQLYYSDLRFVEGKYGITEKEYMKKVAEQTKGQVVRFCFSLQKNDGLEIEWKDSQRYDVRFYNFQSANSINFKGLEQEIMPAENQFKQKPYNNGAINLNIAKYGKEGKKLRKFNTDILGKKHYLFYEKEPKNIIK

SEQ ID NO: 944 - protein, 1150 aa, Enterococcus faecalis; identical to SEQ ID NO: 178

SEQ ID NO: 945 - protein, 1150 aa, Enterococcus faecalis; identical to SEQ ID NO: 179

SEQ ID NO: 946 - protein, 1340 aa, Enterococcus faecium
MKKEYTIGLDIGTNSVGWSVLTDDYRLVSKKMKVAGNTEKSSTKKNFWGVRLFDEGQTAEARRSKRTARRRLARRRQRILELQKIFAPEILKIDEHFFARLNESFLVLDEKKQSRHPVFATIKQEKSYHQTYPTIYHLRQALADSSEKADIRLVYLAMAHLLKYRGHFLIEGELNTENSSVTETFRQFLSTYNQQFSEADDKQTEKLDEAVDCSFVFTEKMSKTKKAETLLKYFPHEKSNGYLSQFIKLMVGNQGNFKNVFGLEEEAKLQFSKETYEEDLEELLEKIGDDYIDLFVQAKNVYDAVLLSEILSDSTKNTRAKLSAGMIRRYDAHKEDLVLLKRFVKENLPKKYRAFFGDNSVNGYAGYIEGHATQEDFYKFVKKELTGIRGSEVFLTKIEQENFLRKQRTFDNGVIPHQIHLTELRAIIANQKKHYPFLKEEQEKLESLLTFKIPYYVGPLAKKQENSPFAWLIRKSEEKIKPWNLPEIVDMEGSAVRFIERMNNTDMYIPHNKVLPKNSLLYQKFSIYNELTKVRYQDERGQMNYFSSIEKKEIFHELFEKNRKVTKKDLQEFLYLKYDIKHAELSGIEKAFNASYTTYHDFLTMSENKREMKQWLEDPELASMFEEIIKTLTVFEDREMIKTRLSHHEATLGKHIIKKLTKKHYTGWGRLSKELIQGIRDKQSNKTILDYLINDDDFPHHRNRNFMQLINDDSLSFKKEIKKAQMITDTENLEEIVKELTGSPAIKKGILQSLKIVDEIVGIMGYEPANIVVEMARENQTTGRGLKSSRPRLKALEESLKDFGSQLLKEYPTDNSSLQKDRLYLYYLQNGRDMYTGAPLDIHRLSDYDIDHIIPRSFTTDNSIDNKVLVSSKENRLKKDDVPSEKVVKKMRSFWYDLYSSKLISKRKLDNLTKIKLTEEDKAGFIKRQLVETRQITKHVAGILHHRFNKAEDTNEPIRKVRIITLKSALVSQFRNRFGIYKVREINEYHHAHDAYLNGVVALALLKKYPQLAPEFVYGEYLKFNAHKANKATVKKEFYSNIMKFFESDTPVCDENGEIFWDKSKSIAQVKKVINHHHMNIVKKTEIQKGGFSKETVEPKKDSSKLLPRKNNWDPAKYGGLGSPNVAYTVAFTYEKGKARKRTNALEGITIMEREAFEQSPVLFLKNKGYEQAEIEMKLPKYALFELENGRKRMVASNKEAQKANSFLLPEHLVTLLYHAKQYDEISHKESFDYVNEHHKEFSEVFARVLEFAGKYTLAEKNIEKLEKIYKENQTDDLAKLASSFVNLMQFNAMGAPADFKFFDVTIPRKRYTSLTEIWQSTIIHQSITGLYETRIRMGK

SEQ ID NO: 947 - protein, 1339 aa, Enterococcus faecium
MKKEYTIGLDIGTNSVGWSVLTDDYRLVSKKMKVAGNTEKSSTKKNFWGVRLFDEGQTAEARRSKRTARRRLARRRQRILELQKIFAPEILKIDEHFFARLNESFLVLDEKKQSRHPVFATIKQEKSYHQTYPTIYHLRQALADSSEKADIRLVYLAMAHLLKYRGHFLIEGELNTENSSVTETFRQFLSTYNQQFSEADDKQTEKLDEAVDCSFVFTEKMSKTKKAETLLKYFPHEKSNGYLSQFIKLMVGNQGNFKNVFGLEEAKLQFSKETYEEDLEELLEKIGDDYIDLFVQAKNVYDAVLLSEILSDSTKNTRAKLSAGMIRRYDAHKEDLVLLKRFVKENLPKKYRAFFGDNSVNGYAGYIEGHATQEDFYKFVKKELTGIRGSEVFLTKIEQENFLRKQRTFDNGVIPHQIHLTELRAIIANQKKHYPFLKEEQEKLESLLTFKIPYYVGPLAKKQENSPFAWLIRKSEEKIKPWNLPEIVDMEGSAVRFIERMINTDMYMPHNKVLPKNSLLYQKFSIYNELTKVRYQDERGQMNYFSSIEKKEIFHELFEKNRKVTKKDLQEFLYLKYDIKHAELSGIEKAFNASYTTYHDFLTMSENKREMKQWLEDPELASMFEEIIKTLTVFEDREMIKTRLSHHEATLGKHIIKKLTKKHYTGWGRLSKELIQGIRDKQSNKTILDYLINDDDFPHHRNRNFMQLINDDSLSFKKEIKKAQMITDTENLEEIVKELTGSPAIKKGILQSLKIVDEIVGIMGYEPANIVVEMARENQTTGRGLKSSRPRLKALEESLKDFGSQLLKEYPTDNSSLQKDRLYLYYLQNGRDMYTGAPLDIHRLSDYDIDHIIPRSFTTDNSIDNKVLVSSKENRLKKDDVPSEKVVKKMRSFWYDLYSSKLISKRKLDNLTKIKLTEEDKAGFIKRQLVETRQITKHVAGILHHRFNKAEDTNEPIRKVRIITLKSALVSQFRNRFGIYKVREINEYHHAHDAYLNGVVALALLKKYPQLAPEFVYGEYLKFNAHKANKATVKKEFYSNIMKFFESDTPVCDENGEIFWDKSKSIAQVKKVINHHHMNIVKKTEIQKGGFSKETVEPKKDSSKLLPRKNNWDPAKYGGLGSPNVAYTVAFTYEKGKARKRTNALEGITIMEREAFEQSPVLFLKNKGYEQAEIEMKLPKYALFELENGRKRMVASNKEAQKANSFLLPEHLVTLLYHAKQYDEISHKESFDYVNEHHKEFSEVFARVLEFAGKYTLAEKNIEKLEKIYKENQTDDLAKLASSFVNLMQFNAMGAPADFKFFDVTIPRKRYTSLTEIWQSTIIHQSITGLYETRIRMGK

SEQ ID NO: 948 - protein, 1340 aa, Enterococcus faecium
MKKEYTIGLDIGTNSVGWSVLTDDYRLVSKKMKVAGNTEKSSTKKNFWGVRLFDEGQTAEARRSKRTARRRLARRRQRILELQKIFAPEILKIDEHFFARLNESFLVLDEKKQSRHPVFATIKQEKSYHQTYPTIYHLRQALADSSEKADIRLVYLAMAHLLKYRGHFLIEGELNTENSSVTETFRQFLSTYNQQFSEADDKQTEKLDEAVDCSFVFTEKMSKTKKAETLLKYFPHEKSNGYLSQFIKLMVGNQGNFKNVFGLEEEAKLQFSKETYEEDLEELLEKIGDDYIDLFVQAKNVYDAVLLSEILSDSTKNTRAKLSAGMIRRYDAHKEDLVLLKRFVKENLPKKYRAFFGDNSVNGYAGYIEGHATQEDFYKFVKKELTGIRGSEVFLTKIEQENFLRKQRTFDNGVIPHQIHLTELRAIIANQKKHYPFLKEEQEKLESLLTFKIPYYVGPLAKKQENSPFAWLIRKSEEKIKPWNLPEIVDMEGSAVRFIERMINTDMYIPHNKVLPKNSLLYQKFSIYNELTKVRYQDERGQMNYFSSIEKKEIFHELFEKNRKVTKKDLQEFLYLKYDIKHAELSGIEKAFNASYTTYHDFLTMSENKREMKQWLEDPELASMFEEIIKTLTVFEDREMIKTRLSHHEATLGKHIIKKLTKKHYTGWGRLSKELIQGIRDKQSNKTILDYLINDDDFPHHRNRNFMQLINDDSLSFKKEIKKAQMITDTENLEEIVKELTGSPAIKKGILQSLKIVDEIVGIMGYEPANIVVEMARENQTTGRGLKSSRPRLKALEESLKDFGSQLLKEYPTDNSSLQKDRLYLYYLQNGRDMYTGAPLDIHRLSDYDIDHIIPRSFTTDNSIDNKVLVSSKENRLKKDDVPSEKVVKKMRSFWYDLYSSKLISKRKLDNLTKIKLTEEDKAGFIKRQLVETRQITKHVAGILHHRFNKAEDTNEPIRKVRIITLKSALVSQFRNRFGIYKVREINEYHHAHDAYLNGVVALALLKKYPQLAPEFVYGEYLKFNAHKANKATVKKEFYSNIMKFFESDTPVCDENGEIFWDKSKSIAQVKKVINHHHMNIVKKTEIQKGGFSKETVEPKKDSSKLLPRKNNWDPAKYGGLGSPNVAYTVAFTYEKGKARKRTNALEGITIMEREAFEQSPVLFLKNKGYEQAEIEMKLPKYALFELENGRKRMVASNKEAQKANSFLLPEHLVTLLYHAKQYDEISHKESFDYVNEHHKEFSEVFARVLEFAGKYTLAEKNIEKLEKIYKENQTDDLAKLASSFVNLMQFNAMGAPADFKFFDVTIPRKRYTSLTEIWQSTIIHQSITGLYETRIRMGK

SEQ ID NO: 949 - protein, 1340 aa, Enterococcus faecium
MKKEYTIGLDIGTNSVGWSVLTDDYRLVSKKMKVAGNTEKSSTKKNFWGVRLFDEGQTAEARRSKRTARRRLARRRQRILELQKIFAPEILKIDEHFFARLNESFLVLDEKKQSRHPVFATIKQEKSYHQTYPTIYHLRQALADSSEKADIRLVYLAMAHLLKYRGHFLIEGELNTENSSVTETFRQFLSTYNQQFSEADDKQTEKLDEAVDCSFVFTEKMSKTKKAETLLKYFPHEKSNGYLSQFIKLMVGNQGNFKNVFGLEEEAKLQFSKETYEEDLEELLEKIGDDYIDLFVQAKNVYDAVLLSEILSDSTKNTRAKLSAGMIRRYDAHKEDLVLLKRFVKENLPKKYRAFFGDNSVNGYAGYIEGHATQEDFYKFVKKELTGIRGSEVFLTKIEQENFLRKQRTFDNGVIPHQIHLTELRAIIANQKKHYPFLKEEQEKLESLLTFKIPYYVGPLAKKQENSPFAWLIRKSEEKIKPWNLPEIVDMEGSAVRFIERMINTDMYMPHNKVLPKNSLLYQKFSIYNELTKVRYQDERGQMNYFSSIEKKEIFHELFEKNRKVTKKDLQEFLYLKYDIKHAELSGIEKAFNASYTTYHDFLTMSENKREMKQWLEDPELASMFEEIIKTLTVFEDREMIKTRLSHHEATLGKHIIKKLTKKHYTGWGRLSKELIQGIRDKQSNKTILDYLINDDDFPHHRNRNFMQLINDDSLSFKKEIKKAQMITDTENLEEIVKELTGSPAIKKGILQSLKIVDEIVGIMGYEPANIVVEMARENQTTGRGLKSSRPRLKALEESLKDFGSQLLKEYPTDNSSLQKDRLYLYYLQNGRDMYTGAPLDIHRLSDYDIDHIIPRSFTTDNSIDNKVLVSSKENRLKKDDVPSEKVVKKMRSFWYDLYSSKLISKRKLDNLTKIKLTEEDKAGFIKRQLVETRQITKHVAGILHHRFNKAEDTNEPIRKVRIITLKSALVSQFRNRFGIYKVREINEYHHAHDAYLNGVVALALLKKYPQLAPEFVYGEYLKFNAHKANKATVKKEFYSNIMKFFESDTPVCDENGEIFWDKSKSIAQVKKVINHHHMNIVKKTEIQKGGFSKETVEPKKDSSKLLPRKNNWDPAKYGGLGSPNVAYTVAFTYEKGKARKRTNALEGITIMEREAFEQSPVLFLKNKGYEQAEIEMKLPKYALFELENGRKRMVASNKEAQKANSFLLPEHLVTLLYHAKQYDEISHKESFDYVNEHHKEFSEVFARVLEFAGKYTLAEKNIEKLEKIYKENQTDDLAKLASSFVNLMQFNAMGAPADFKFFDVTIPRKRYTSLTEIWQSTIIHQSITGLYETRIRMGK

SEQ ID NO: 950 - protein, 1339 aa, Enterococcus faecium
MKKEYTIGLDIGTNSVGWSVLTDDYRLVSKKMKVAGNTEKSSTKKNFWGVRLFDEGQTAEARRSKRTARRRLARRRQRILELQKIFAPEILKIDEHFFARLNESFLVLDEKKQSRHPVFATIKQEKSYHQTYPTIYHLRQALADSSEKADIRLVYLAMAHLLKYRGHFLIEGELNTENSSVTETFRQFLSTYNQQFSEADDKQTEKLDEAVDCSFVFTEKMSKTKKAETLLKYFPHEKSNGYLSQFIKLMVGNQGNFKNVFGLEEAKLQFSKETYEEDLEELLEKIGDDYIDLFVQAKNVYDAVLLSEILSDSTKNTRAKLSAGMIRRYDAHKEDLVLLKRFVKENLPKKYRAFFGDNSVNGYAGYIEGHATQEDFYKFVKKELTGIRGSEVFLTKIEQENFLRKQRTFDNGVIPHQIHLTELRAIIANQKKHYPFLKEEQEKLESLLTFKIPYYVGPLAKKQENSPFAWLIRKSEEKIKPWNLPEIVDMEGSAVRFIERMINTDMYIPHNKVLPKNSLLYQKFSIYNELTKVRYQDERGQMNYFSSIEKKEIFHELFEKNRKVTKKDLQEFLYLKYDIKHAELSGIEKAFNASYTTYHDFLTMSENKREMKQWLEDPELASMFEEIIKTLTVFEDREMIKTRLSHHEATLGKHIIKKLTKKHYTGWGRLSKELIQGIRDKQSNKTILDYLINDDDFPHHRNRNFMQLINDDSLSFKKEIKKAQMITDTENLEEIVKELTGSPAIKKGILQSLKIVDEIVGIMGYEPANIVVEMARENQTTGRGLKSSRPRLKALEESLKDFGSQLLKEYPTDNSSLQKDRLYLYYLQNGRDMYTGAPLDIHRLSDYDIDHIIPRSFTTDNSIDNKVLVSSKENRLKKDDVPSEKVVKKMRSFWYDLYSSKLISKRKLDNLTKIKLTEEDKAGFIKRQLVETRQITKHVAGILHHRFNKAEDTNEPIRKVRIITLKSALVSQFRNRFGIYKVREINEYHHAHDAYLNGVVALALLKKYPQLAPEFVYGEYLKFNAHKANKATVKKEFYSNIMKFFESDTPVCDENGEIFWDKSKSIAQVKKVINHHHMNIVKKTEIQKGGFSEETVEPKKDSSKLLPRKNNWDPAKYGGLGSPNVAYTVAFTYEKGKARKRTNALEGITIMEREAFEQSPVLFLKNKGYEQAEIEMKLPKYALFELENGRKRMVASNKEAQKANSFLLPEHLVTLLYHAKQYDEISHKESFDYVNEHHKEFSEVFARVLEFAGKYTLAEKNIEKLEKIYKENQTDDLAKLASSFVNLMQFNAMGAPADFKFFDVTIPRKRYTSLTEIWQSTIIHQSITGLYETRIRMGK

SEQ ID NO: 951 - protein, 1340 aa, Enterococcus faecium
MKKEYTIGLDIGTNSVGWSVLTDDYRLVSKKMKVAGNTEKSSTKKNFWGVRLFDEGQTAEARRSKRTARRRLARRRQRILELQKIFAPEILKIDEHFFARLNESFLVLDEKKQSRHPVFATIKQEKSYHQTYPTIYHLRQALADSSEKADIRLVYLAMAHLLKYRGHFLIEGELNTENSSVTETFRQFLSTYNQQFSEADDKQTEKLDEAVDCSFVFTEKMSKTKKAETLLKYFPHEKSNGYLSQFIKLMVGNQGNFKNVFGLEEEAKLQFSKETYEEDLEELLEKIGDDYIDLFVQAKNVYDAVLLSEILSDSTKNTRAKLSAGMIRRYDAHKEDLVLLKRFVKENLPKKYRAFFGDNSVNGYAGYIEGHATQEDFYKFVKKELTGIRGSEVFLTKIEQENFLRKQRTFDNGVIPHQIHLTELRAIIANQKKHYPFLKEEQEKLESLLTFKIPYYVGPLAKKQENSPFAWLIRKSEEKIKPWNLPEIVDMEGSAVRFIERMINTDMYIPHNKVLPKNSLLYQKFSIYNELTKVRYQDERGQMNYFSSIEKKEIFHELFEKNRKVTKKDLQEFLYLKYDIKHAELSGIEKAFNASYTTYHDFLTMSENKREMKQWLEDPELASMFEEIIKTLTVFEDREMIKTRLSHHEATLGKHIIKKLTKKHYTGWGRLSKELIQGIRDKQSNKTILDYLINDDDFPHHRNRNCMQLINDDSLSFKKEIKKAQMITDTENLEEIVKELTGSPAIKKGILQSLKIVDEIVGIMGYEPANIVVEMARENQTTGRGLKSSRPRLKALEESLKDFGSQLLKEYPTDNSSLQKDRLYLYYLQNGRDMYTGAPLDIHRLSDYDIDHIIPRSFTTDNSIDNKVLVSSKENRLKKDDVPSEKVVKKMRSFWYDLYSSKLISKRKLDNLTKIKLTEEDKAGFIKRQLVETRQITKHVAGILHHRFNKAEDTNEPIRKVRIITLKSALVSQFRNRFGIYKVREINEYHHAHDAYLNGVVALALLKKYPQLAPEFVYGEYLKFNAHKANKATVKKEFYSNIMKFFESDTPVCDENGEIFWDKSKSIAQVKKVINHHHMNIVKKTEIQKGGFSKETVEPKKDSSKLLPRKNNWDPTKYGGLGSPNVAYTVAFTYEKGKARKRTNALEGITIMEREAFEQSPVLFLKNKGYEQAEIEMKLPKYALFELENGRKRMVASNKEAQKANSFLLPEHLVTLLYHAKQYDEISHKESFDYVNEHHKEFSEVFARVLEFAGKYTLAEKNIEKLEKIYKENQTDDLAKLASSFVNLMQFNAMGAPADFKFFDVTIPRKRYTSLTEIWQSTIIHQSITGLYETRIRMGK

SEQ ID NO: 952 - protein, 892 aa, Enterococcus faecium
MTFKIPYYVGPLAKKQENSPFAWLIRKSEEKIKPWNLPEIVDMEGSAVRFIERMINTDMYMPHNKVLPKNSLLYQKFSIYNELTKVRYQDERGQMNYFSSIEKKEIFHELFEKNRKVTKKDLQEFLYLKYDIKHAELSGIEKAFNASYTTYHDFLTMSENKREMEQWLEDPELASMFEEIIKTLTVFEDREMIKTRLSHHKATLGKHIIKKLTKKHYTGWGRLSKELIQGIRDKQSNKTILDYLINDDDFPHHRNRNFMQLINDDSLSFKKEIKKAQMITDTENLEEIVKELTGSPAIKKGILQSLKIVDEIVGIMGYEPANIVVEMARENQTTGRGLKSSRPRLKALEESLKDFGSQLLKEYPTDNSSLQKDRLYLYYLQNGRDMYTGAPLDIHRLSDYDIDHIIPRSFTTDNSIDNKVLVSSKENRLKKDDVPSEKVVKKMRSFWYDLYSSKLISKRKLDNLTKIKLTEEDKAGFIKRQLVETRQITKHVAGILHHRFNKAEDTNEPIRKVRIITLKSALVSQFRNRFGIYKVREINEYHHAHDAYLNGVIALALLKKYPQLAPEFVYGEYLKFNAHKANKATVKKEFYSNIMKFFESDTPVCDENGEIFWDKSKSIAQVKKVINHHHMNIVKKTEIQKGGFSKETVEPKKDSSKLLPRKNNWDPAKYGGLGSPNVAYTVAFTYEKGKARKRTNALEGITIMEREAFEQSPVLFLKNKGYEQAEIEMKLPKYALFELENGRKRMVASNKEAQKANSFLLPEHLVTLLYHAKQYDEISHKESFDYVNEHHKEFSEVFARVLEFAGKYTLAEKNIEKLEKIYKENQTDDLAKLASSFVNLMQFNAMGAPADFKFFDVTIPRKRYTSLTEIWQSTIIHQSITGLYETRIRMGK

SEQ ID NO: 953 - protein, 1336 aa, Enterococcus hirae
MTKDYTIGLDIGTNSVGWAVLTDDYQLMKRKMSVHGNTEKKKIKKNFWGARLFDEGQTAEFRRTKRTNRRRLARRKYRLSKLQDLFAEELCKQDDCFFVRLEESFLVPEEKQYKPASIFPTLEEEKEYYQKYPTIYHLRQKLVDSTEKEDLRLVYLALAHLLKYRGHFLFEGDLDTENTSIEESFRVFLEQYSKQSDQPLIVHQPVLTILTDKLSKTKKVEEILKYYPTEKINSFFAQCLKLIVGNQANFKRIFDLEAEVKLQFSKETYEEDLESLLEKIGDEYLDIFLQAKKVHDAILLSEIISSTVKHTKAKLSSGMVERYERHKADLAKFKQFVKENVPQKATVFFKDTTKNGYAGYIKGKTTQEEFYKFVKKELSGVVGSEPFLEKIDQETFLLKQRTYTNGVIPHQVHLIELKAIIDQQKQHYPFLEEAGPKIIALFKFRIPYYVGPLAKEQEASSFAWIERKTAEKINPWNFSEVVDIEKSAMRFIQRMTKQDTYLPTEKVLPKNSLLYQKYMIFNELTKVSYKDERGVKQYFSGDEKQQIFKQLFQKERGKITVKKLQNFLYTHYHIENAQIFGIEKAFNASYSTYHDFMKLAKTNQKAMQEWLEQPEMEPIFEDIVKILTIFEDRQMIKHQLSKYQEVFGEKLLKEFARKHYTGWGRFSAKLIHGIRDRKTNKTILDYLINDDDVPANRNRNLMQLINDEHLSFKEEIAKATVFSKHKSLVDVIQDLPGSPAIKKGIWQSLKIVEELIAIIGYKPKNIVIEMARENQKTHRTSPRLKALENGLKQIGSTLLKEQPTDNKALQKERLYLYYLQNGRDMYTGEPLEIENLHQYEVDHIIPRSFIVDNSIDNKVLVASKQNQKKRDDVPKKQIVNEQRIFWNQLKEAKLISPKKYAYLTKIELTPEDKARFIQRQLVETRQITKHVANILHQSFNQEEEGTDCDGVQIITLKATLTSQFRQTFGLYKVREINPHHHAHDAYLNGFIANVLLKRYPKLAPEFVYGKYVKYSLARENKATAKKEFYSNILKFLESDEPFCDENGEIYWEKSHHLPRIKKVLSSHQVNVVKKVEQQKGGFYKETVNSKEKPDKLIERKNNWDVTKYGGFGSPVIAYAIAFVYAKGKTQKKTRAIEGITIMEQAAFEKDPTTFLKEKGFPQVTEFIKLPKYTLFEFDNGRRRFLASHKESQKGNPFILSDQLVTLLYHAQHYDKITYQESFDYVNTHLSDFSAILTEVLAFAEKYTLADKNIERIQELYEENKYGETSMIAQSFLQLLQFNAIGAPADFKFFGVTIPRKRYTSLTEIWDATIIYQSVTGLYETRIRMGDLWAGEQ

SEQ ID NO: 954 - protein, 116 aa, Enterococcus sp.
MYSIGLDLGISSVGWSVIDERTGNVIDLGVRLFSAKNSEKNLERRTNRGGRRLIRRKTNRLKDAKKILAAVGFYEDKSLKNSCPYQLRVKGLTELLSKGEIYKVTLHILKNVELVT

SEQ ID NO: 955 - protein, 1391 aa, Eubacterium sp.
MENKQYYIGLDVGTNSVGWAVTDTSYNLLRAKGKDMWGARLFDEAKTAVERRTKRTSRRRSEREKARKAMLKELFADEINKVDPNFFIRLEESKFFLDDRSENNRQRYTLFNDAKFTDKDYYEKYKTIFHLRSALINSDEKFDVRLVFLAILNLFSHRGHFLNASLKGDGEIQGVDIFYNDLYEVCEEFEIDLPQISNIDNFEKILSQKGKSRTKILEELSEELSISKKEKIKYSLLKLICGMKIKVVDIYADEDIQEDDKKKDLGFRESDYEKSSLEVKEIIGDDHFELIERAKAVHDIGLLANIIGNSKYLCEARVEAYDNHHKDLQKIKELLKKYDIKAYTDMFRKMTDKNYSAYVGSVNSNIAKERRSVDNRKIEDLYEYIKKIALKNISDDNEDKIEILKKIETGEFLKKQLTASNGVIPNQLQSRELRAILKKAENYLPFLKEKGEKNLTVSEMIIQLFEFQIPYYVGPLDKNPKKDKNANSWAVIPSGGRILPWNFEDKVDVKGSRKEFIEKMVRKCTYLSEEHTLPKQSLLYEKFMVLNEINNIKIDGEKISVEAKQKIYNDLFMKGKKVSQKAIKQELISLNIMSKDSVLSGIDTVCNAYLSSIAKFRGVFDENVNNQSTIDMIEDIIFLKTVYSDEKRFVKEEIVEKYGDEIDKDKIKRILGFKFSNWGNISKSFLELEGADVGTGEIRSIIQSLWETNFNLMELLSSRFTYMDELEKRVKKLEKPLSEWTIEDLDDMYLSSPVKRMIWQSMKIVDEIQTVIGYAPKRIFVEMTRSEGEKVRTKSRKDRLKELYSAIKEDSKQWVKELDAKDESYFRSKKMYLYYLQKGRCMYSGEVIELDKLMDDNLYDIDHIYPRSFVKDDSLDNLVLVKKEINNRKQNDPITPQIQASCQGFWKVLHEQGFISNEKYSRLTRKTQEFSDEEKLSFINRQIVETGQATKCMAQILQKSMGEDVDVVFSKARLVSEFRHKFELFKSRLINDFHHANDAYLNIVVGNSYFVKFTRNPANFIKDARKNPDNPAYKYHMDRFFERDVKSKSEVAWIGQSEGNAGTIAIVKKTMSKNSPLITKKVEEGHGSITKETIVGVKEIKFGRNKVEKADKTPKKANLQAYRPIKTSDERLCNILRYGGRTSISISGYCLVEYVKKRKTIRSLEAIPVYLGRKDSLSEEKLLNYFRYNLNDGGKDSVSDIRLCLPFISTNSLVKIDGYLYYLGGKNDDRIQLYNAYQLKMKKEEVEYIRKIEKAVSMSKFDEIDREKNPVLTEEKNIELYNKIQDKFENTVFSKRMSLVKYNKKDLSFGDFLKNKKSKFEEIDLEKQCKVLYNIIFNLSNLKEVDLSDIGGSKSTGKCRCKKNITNYKEFKLIQQSITGLYSCEKDLMTI

SEQ ID NO: 956 - protein, 1391 aa, Eubacterium yurii
MENKQYYIGLDVGTNSVGWAVTDTSYNLLRAKGKDMWGARLFEKANTAAERRTKRTSRRRSEREKARKAMLKELFADEINRVDPSFFIRLEESKFFLDDRSENNRQRYTLFNDATFTDKDYYEKYKTIFHLRSALINSDEKFDVRLVFLAILNLFSHRGHFLNASLKGDGDIQGMDVFYNDLVESCEYFEIELPRITNIDNFEKILSQKGKSRTKILEELSEELSISKKDKSKYNLIKLISGLEASVVELYNIEDIQDENKKIKIGFRESDYEESSLKVKEIIGDEYFDLVERAKSVHDMGLLSNIIGNSKYLCEARVEAYENHHKDLLKIKELLKKYDKKAYNDMFRKMTDKNYSAYVGSVNSNIAKERRSVDKRKIEDLYKYIEDTALKNIPDDNKDKIEILEKIKLGEFLKKQLTASNGVIPNQLQSRELRAILKKAENYLPFLKEKGEKNLTVSEMIIQLFEFQIPYYVGPLDKNPKKDNKANSWAKIKQGGRILPWNFEDKVDVKGSRKEFIEKMVRKCTYISDEHTLPKQSLLYEKFMVLNEINNIKIDGEKISVEAKQKIYNDLFVKGKKVSQKDIKKELISLNIMDKDSVLSGTDTVCNAYLSSIGKFTGVFKEEINKQSIVDMIEDIIFLKTVYGDEKRFVKEEIVEKYGDEIDKDKIKRILGFKFSNWGNLSKSFLELEGADVGTGEVRSIIQSLWETNFNLMELLSSRFTYMDELEKRVKKLEKPLSEWTIEDLDDMYLSSPVKRMIWQSMKIVDEIQTVIGYAPKRIFVEMTRSEGEKVRTKSRKDRLKELYNGIKEDSKQWVKELDSKDESYFRSKKMYLYYLQKGRCMYSGEVIELDKLMDDNLYDIDHIYPRSFVKDDSLDNLVLVKKEINNRKQNDPITPQIQASCQGFWKILHDQGFMSNEKYSRLTRKTQEFSDEEKLSFINRQIVETGQATKCMAQILQKSMGEDVDVVFSKARLVSEFRHKFELFKSRLINDFHHANDAYLNIVVGNSYFVKFTRNPANFIKDARKNPDNPVYKYHMDRFFERDVKSKSEVAWIGQSEGNSGTIVIVKKTMAKNSPLITKKVEEGHGSITKETIVGVKEIKFGRNKVEKADKTPKKPNLQAYRPIKTSDERLCNILRYGGRTSISISGYCLVEYVKKRKTIRSLEAIPVYLGRKDSLSEEKLLNYFRYNLNDGGKDSVSDIRLCLPFISTNSLVKIDGYLYYLGGKNDDRIQLYNAYQLKMKKEEVEYIRKIEKAVSMSKFDEIDREKNPVLTEEKNIELYNKIQDKFENTVFSKRMSLVKYNKKDLSFGDFLKNKKSKFEEIDLEKQCKVLYNIIFNLSNLKEVDLSDIGGSKSTGKCRCKKNITNYKEFKLIQQSITGLYSCEKDLMTI

SEQ ID NO: 957 - protein, 1142 aa, Facklamia hominis
MYSVGLDIGIASCGYSIINDVNGNIVELGTLLFKSRNSDNNEERRTNRGSRRLINRRRTRLDDGKKLLAEKGFKQDSKLKHVCPYELRVKGLHEKLTQGEIYKVVLHILKKRGISYLDESDENSSGIDGASYKDQVNLNLNLQKELTPGQIQLKRLKENGRIKSGVTFENGYQLNVFSVSAYANELNKILTKQSEYYSEIDQIWIDRFTKNGYRKEAGLVYRKRPYYDGPGNEKNNSIYGRWANFKEDGHPKENIFDQLIGLDSVDSTQVRASASTLTAQKYNLLNDLNNLTIIEDDRKFTTDEKVSIINYLMTQDITRFGPKELAKFYQLEVDQIRGWRIDNKGNPEIHSLKVYRDWKKIFNTSSIDLTSIQTWVVDELANVITLNTEIPSTLATLKIKIPDIDQQILNFVENNFYELKKKTSKNSWHSFSLKTLNILIPELLNTSEEQNTILERLNLKFDLKNKYAEKNQIPVKELLEQIYNPTVTKSVHQSIKLFNEIIEKYGKNNISYVTIEMPRDKNDQDQKDTIKRINKLNSERKNDSEKYFLERSGWDTIRFESALKKPRFAEKLLFYYEQKGKCAYSGQDILAESLLNESCEVDHIIPLSISFDDSIHNKVLVTASSNQEKGQRTPYMAFIDGAKLGQSWDDFVAWVNSCGFHRKKVQNLLYEENIFNPDVQRGFVSRNLNDTRYASRIVLNAIQSFFYKQKDLTKVKVVNGSFTHTLRKKWGSSLDKNRDTYHHHAVDATLCAVTPFINIVKYEFFEEDGIKYMVDLTTGEKVAYSDYKKMKFYDKRAYVPIWDGFIKQLTPANLYPKIKFSHQVDSKWNRKISDATIYSTRKIVETKINKKGVAKETVKDIVIDKIKDIYTPEGWRKFKEKQDKLLMKNFDEKTYNKLIKIAKEYPEKKEVQTSNGKVSLVEVSPFKMYCEEQNVPAIRKYSKKGNGPYIRSLKFYDKELGKHINITKDSYGNDIERTIRNKKIILKNQNSWRTDVYYNSVNNCYELLGIKYCHLKFYRGKYGIPKSIYDELKKEDEISSESVFKFSLYRHDRVRFEKDGEYIEALFGSKNESNKNYLELSPIDKNKWLSKENVKFFGEVAASGRFIKGLKPGIKVIKQSTDYMGHVYAIHQEKLKFVLSDA

SEQ ID NO: 958 - protein, 1347 aa, Finegoldia magna
MKSEKKYYIGLDVGTNSVGWAVTDEFYNILRAKGKDLWGVRLFEKAKTAADTRTFRSGRRRNDRKGMRLQILREIFEDEIKKVDKDFYDRLDESKFWAEDKKVSGKYSLFNDKNFSDKQYFEKFPTIFHLRKYLMEEHGKVDIRYYFLAINQMMKRRGHFLIDGQISHVTDDKPLKEQLILLINDLLKIELEEELMDSIFEILADVNEKRTDKKNNLKELIKGQDFNKQEGNILNSIFESIVTGKAKIKNIISDEDILEKIKEDNKEDFVLTGDSYEENLQYFEEVLQENITLFNTLKSTYDFVILQSILKGKSTLSDAQVERYDEHKKDLEILKKVIKKYDEDGKLFKQVFKEDNGNGYVSYIGYYLNKNKKITAKKKISNIEFTKYVKGILEKQCDCEDEAVKYLLGKIEQENFLLKQISSINSVIPHQIHLFELDKILENLAKNYPSFNNKKEEFTKIEKIRKTFTFRIPYYVGPLNDYHKNNGGNAWIFRNKGEKIRPWNFEKIVDLHKSEEEFIKRMLNQCTYLPEETVLPKSSILYSEYMVLNELNNLRIKGKPLDTDVKLKLIEELFKKKTKVTLKSIRDYMIRNNFADKEDFDNSEKNLEIVSNMKSYIDFNNILGDKFELEMVEDLIEKITIHTGNKTLLKKYIEETYPDLSSSQIQKIINLKYKDWGRLSRKLLDGIKGRNKTDDVNTVINFMRNSSDNLMQIIEGKNYSFNEYIDNLRKKYIPQEISYEVVENLYVSPSVKKMIWQVIRVTEEITKVMGYDPDKIFIEMAKSEEEKKTTISRKNKLLDLYKAIKKDERDSQYEKLLTGLNKLDESELRSKKLYLYYTQMGRDMYTGEKIDLDKLFDSTHYDKDHIIPQSMKKDDSIINNLVLVNKNANQTTKGNIYPVPSSIRNNPDIYNYWKYLMEKEFISKEKYNRLIRNTPLTNEELGVFINRQLVETRQSTKAIKELFEKFYQKSKIIPVKASLASDLRKDMNTLKSREVNDLHHAHDAFLNIVAGDVWNREFTSNPINYVNENREGDKVKYSLSKYFTRPRKSKGKVIWTPEKGRKLIVDTLNKPSVLISNESHVKKGELFNATISGKKDYKKGKIYLPLKKDDRLKDVSKYGGYKAINGAFFFLVEHTKSKKRIRSIELFPLHLLSKFYEDKNTVLDYAINVLQLQDPKIIIDKINYRTEIIIDNFSYLISTKSNDGSITVKPNEQMYWRVDEISNLKKIENKYKKDAILTEEDRKIMESYIDKIYQQFKAGKYKNRRTTDTIIEKYEIIDLDTLDNKQLYQLLVAFISLSYKTSNNAVDFTVIGLGTECGKPRITNLPDNTYLVYKSITGIYEKRIRIK

SEQ ID NO: 959 - protein, 1348 aa, Finegoldia magna; identical to SEQ ID NO: 222

SEQ ID NO: 960 - protein, 1516 aa, Flavobacteriaceae bacterium
MLKQQKDKIIGMNKKILGLDLGTNSIGWALVKQDLENKYGEIIGCGSRIIPMSQDVLGKFDAGISISQTAERTNYRSVRKLIQRNTLRRERLHRVLHQLDFLPKHYNDSIDFEKKLGQFKTDKETKLNYFVNQHGKHEFLFKDSFNEMVKEFKEEQPELFYIKNNGKETKIPYDWTIYYLRKKALSKKISKEELSWLVLNFNQKRGYYQLRGEIDEEKEKNKRYEKLYVSEVVKTNNTIKKTGEYLYDIYFDNGWKYEKQTTKPQDWLHKHKEFIITTTTLKNGETKRTFKTVDSEKDWIAIKSKTEQDIKESNKTVGAFIYDTLLKNPTQKIRGSLVKTIERKFYREEFEKILKEQIKHRPEINVNTAIGKENYTKCVTELYPRNEAHANNILTNDFNYLFTKDILFYQRPLKSKKSEIANCQYEYRTYIKKKEKTGKEERVKQPLKATPKSHPLFQEFRLWQFIHNLKIYIRETTVGNKPLFDVDITDTFFTSENDWATLFEYLNNKKEIEQKHVLEYLVSKKIISKSEKTDYRWNYVEDKKYPGNETRVDFINRLKKVENLNVDEFLTSELEFKLWHIIYSVTDKNEYEKALENFAIRQNIDKDSFVNSFKKFPPFKSDYGAYSTKAIKKLLPLMRLGKFWDGSEIPKVVVEKITDIKTRLTSVNYDESLFKKDEKKILETIVDDITPKQLLKSFVKLKGKNHLAGLNTYQACYLVYERHSESSDITQWENPDDIDSFLNHFKQHSLRNPIVEQVVTETLRTVRDIWKYYGNGSPNYFNEIHIELGREMKNPADKRKQMSAKINENENTNQRIKGILQELMNDGVQDIKPYSPSQQEILKIYEEGISQNPNVDYSKVSEDEITKIKKSNNPTLKEIQRYKLWLEQKYISPYTGKPIPLSELFTPAYQIEHIIPQSRYFDNSLSNKIICESEVNEDKSNKTAYEYLKTNGGSIVHGHHLLSLKEYEDHCQHYFKKNRTKLKNLLSEEIPEGFINRQLNDSRYISKLIKGLLSNIVREENEQEATSKNIVPVTGSITSKLKQDWGLNDKWNEIIAPRFKRLNKMTNSNDFGYFDEKINTFRIQVPDAISRGFNKKRIDHRHHTLDALVIACCTKKHIQYLNSLNNEIIKHELKPSILIKNAQGDYTKHFMLPWNNFPIDCKNAIENTIVSFKQNLRVINKTSNKYQSYKDENGNLRLGKDGKPKKGLTKQTKGNNWAVRKAMHEDTFYGEIVDGENKGKLKIKTLLDTSFDVKKIEDKVLDKSIRTILINYLKQDKYKNLSKPHEEAFSPNGIIEMNKNIISLNNNIPHKPIKRVTLKHEKGKKFSIKTLLDKKTKFAKSATGTNVFFCIYKNINGKIKYHTPSFEEIIEIQKQEFEIKYKSKLNVPETLFDKKESFELLFYLQPNDLVYLPNDEELKNRQLIDFNNLNKKQIKRIYKFTDGSGTTANFIPYQVAKVIFNLNKKEQAKSSFKYPIQNEFGVGSPQSKNQKSIEGILIKERCIKLKIDRLGNISKA

SEQ ID NO: 961 - protein, 1629 aa, Francisella cf.
MNFKILPIAIDLGVKNTGVFSAFYQKGTSLERLDNKNGKVYELSKDSYTLLMNNRTARRHQRRGIDRKQLVKRLFKLIWTEQLNLEWDKDTQQAISFLFNRRGFSFITDGYSPEYLNIVPEQVKAILMDIFDDYNGEDDLDSYLKLATEQESKISEIYNKLMQKILEFKLRKLCTDIKDDKVSTKTLKEITSYEFELLADYLANYSEILKTQKFSYTDKQGNLKELSYYHHDKYNIQEFLKRHATINIQILDTLLTDDLDIWNFNFEKFDFDKNEEKLQNQEDKDHIQAHLHHFVFAVNKIKSEMASGGRHRSQYFQEITNVLDENNHQEGYLKNFCENLHNKKYSNLSVKNLVNLIGNLSNLELKPLRKYFNDKIHAKADHWDEQKFTETYCHWILGEWRVGVKDQDKKDGAKYSYKDLCNELKQKVTKAGLVDFLLELDPCRTIPPYLDNNNRKPPKCQSLILNPKFLDNQYPNWQQYLQELKKLQSIQNYLESFETDLKVLKSSKDQPYFVEYRSSNQQIASGQRDYKDLDARILQFIFDRVKASDELLLNEIYFQAKKLKQKASSELEKLESSKKLDEVIANSQLSQILKSQHTNGIFEQGTFLHLVCKYYKQRQRARDSRLYIMPEYRYDKKLHKYNNTGRFDDDNQLLTYCNHKPRQKRYQLLNDLAGVLQVSPNFLKDKIGSDDDLFISKWLVEHIRGFKKACEDSLKIQKDNRGLLNHKINIARNTKGKCEKEIFNLICKIEGSEDKKGNYKHGLAYELGVLLFGEPNEASKPEFDRKIKKFNSIYSFAQIQQIAFAERKGNANTCAVCSADNAHRMQQIKITEPVEDNKDKIILSAKAQRLPAITTRIVDGAVKKMATILAKNIVDDNWQNIKQVLSAKHQLHIPIITESNAFEFEPALADVKGKSLKDRRKKALERISPENIFKDKNNRIKEFAKGISAYSGANLTDGDFDGAKEELDHIIPRSHKKYGTLNDEANLICVTRGDNKNKGNRIFCLRDLANNYKLKQFETTDDLEIEKKIADTIWDANKKDFKFGNYRSFINLTPQEQKAFRHALFLADENPIKQAVIRAINNRNRTFVNGTQRYFAEVLANNIYLRAKKENLNTDKISFDYFGIPTIGNGRGIAEIRQLYEKVDSDIQAYAKGDKPQASYSHLIDAMLAFCIAADEHRNDGSIGLEIDKNYSLYPLDKNTGEVFTKDIFSQIKITDNEFSDKKLVRKKATEGFNTHRQMTRDGIYAENYLPILIHKELDEVRKGYTWKNSEEIKIFKGKKYDIQQLNNLLYCLKFVDKPISIDIQISTLEELRNILTTNNIAATAEYYYINLKTQKLHEYYIENYNTALGYKKYTKEMEFLRSLAYRSERVKIKSIDDVKQVLDKDSNFIIGKITLPFKKEWQRLYREWQNITIKDDYEFLKSFFNVKSITKLHKKVRKDFSLPISTNEGKFLVKRKTWDNNFIYQILNDSDSRVDGTKPFIPAFDISKNEIVEAIIDSFTSKNIFWLPKNIELQKVDNKNIFAIDTSKWFEVETPSDLRDIGVATIQYKIDNNSRPKVRVKLDYVIDDDSKINYFTNHSLLKSRYPDKVLEILKQSTIIEFESSGFNKTIKEMLGMTLAGIYNETSNN

SEQ ID NO: 962 - protein, 1646 aa, Francisella cf.
MNIKILPIAIDLGAKNTGVFSAFYQKGTSLESLDNKNGKVYELSKDSYTLLMNNRTARRHQRRGIDRKQLVKRLFKLIWTKQLNLEWNKDTQQTISFLLNRRGFSFITDGYSPEYLNIAPEAVKAILMSILDDYNGEDDLDSYLQSATENDSKIDELYNKLLQKALEFKLRKLCIDIKEDKVTTKTLKELSNTEFKLLANYLVDYDRILRTQKFSYTDKQGNLRELNYYHHDKYNIQEFLKRNIIINDVILEKLTDDLDIWNLNFDKFDFEKNLEKLENQEDKDYLQTHLHHFVFAVNKIKSEMASGGRHRSQYFQEITNVLVENNHQEGYLKNFCENLHNKKYSNLSVKNLVNLIGNLSNLELKPLRKYFNDKIHAKADYWDEQKFAETYSDWILGEWRVGAKDKDKKDGAKYSYKNLCDELKQKVGINQDGIINQTKSDFVDFLLELDPCRTIPPYLDNNNRKPPKCQSLILNPKFLDNKYPNWQQYLQELKKLQTVQNYLGNFEIDLKDLKSSKEQPYFVKYKSLNQQIASGQRDYKDLDARVLQFIFDRVKASDELLLNEIYSHAKKLKQNTSSELEKLELCKKLDEVIANSQLSQILKSQHVNGIFEQGTFLHLVCKYYKQRQRARDSRLYIMPEYRYDKKLDKYNNTGRFDDDNQLLTYCNHKPRQKRYQLLNDLAGVLQVSPNFLKDKIGSDDDLFISKWLVEHIRGFKKACEDSLKIQKDNRGLLNHKINIARNTKGKCEKEIFNLICKIEGSEDKKGNYKHGLAYELGVLLFGEPNQASKLEFDRKIKKFNSIYSFAQIQQIAFAERKGNANTCAVCSADNAHRMQQIKVAKPVEGNKDNIILSAKAQRLPAIPTRIVDGAVKKIATILARNIVDDNWDNIKQALSNNQQLHVPIITESNAFEFEPALADIKGKSLKDKRKKALERIDPENVFKDKNNRIKEFAKGISAYSDANLANGDFDGAKEELDHIIPRSHKKYGTLNDEANLICVTREDNQNRGNKAVFLYDLKPNYKLKQFNTTDDLEIEKKIADTIWDASKQDFKFGNYRSFINLTPQEQIAFRHALFLADKNPIKKAVIRAIDNRNRTFVNGTQRYFAEVLANNIYLRAKKENLATNRITFDYFGIETTNSNGRGIADVRKLYEKVDSDIQAYAKGDKPQDSYSHLIDAMIAFCVAADEHKNEGSIGLKMGNQYGLFPTPDKYDENTGEIISWHNDDIFRKIKVSDNQFSDKKLVRKKATEGFNTHRQMTRDGIYGESYLPILIHKNLNEVRKGYNWENSEEIKIFKGKKYDIQQLNNLVYCLKFVDKPISIDIQITTLEELRNILETNNISTTAEYYYINLKTQKLHEYYIENYNTALGYKKYTKEMEFLRSLAYRTERVKIKSIDDVSMILAKDSNFKAGKIELPFKTEWQRLYLEWQNTTIKDNHEFLKSYFSVKNATKQHKKVRKDFSLPISTNEGKLLVKRKTWDNNFIYQILNDSDSRADGTKPFIPAFDISKNEIVETIIKSFTSKNIFWLPKNIELQKVDNKSIFAIDTSRWFEVETPKDLIEIGVSTIQYKIDNNSRPKVRVKLDYVMDDDSKINYFMNHSLLKSRYPDKVLEILKQSTIIEFESSGFNKTIKEMLGMTLAGIYNETSNN

SEQ ID NO: 963 - protein, 1629 aa, Francisella novicida
MNFKILPIAIDLGVKNTGVFSAFYQKGTSLERLDNKNGKVYELSKDSYTLLMNNRTARRHQRRGIDRKQLVKKLFKLIWTEQLNLEWDKDTQQAISFLFNRRGFSFITDGYSPEYLNIVPEQVKAILMDIFDDYNGEDDLDSYLKLATEQESKISEIYNKLMQKILEFKLRKLCTDIKDDKVSTKTLKEITSYEFELLADYLANYSESLKTQKFSYTDKQGNLKELSYYHHDKYNIQEFLKRHATINDEILDTLLTDDLDIWNFNFEKFDFDKNEEKLQNQEDKDHTQAHLHHFVFAVNKIKSEMASGGRHRGQYFQEITNVLDENNHQEGYLKNFCENLHNKKYSNLSVKNLVNLIGNLSNLELKPLRKYFNDKIHAKADHWDEQKFTETYCHWILGEWRVGLKDQDKKEGAKYSYKDLCNELKQKVTNAGLIDFLLELDPCRTIPPYLDNNNRKPPKCQSLILNPKFLDNQYPNWQQYLQELKKLQIIQDYLESFETDLKVLKSSKDQPYFVEYKSSNQQIASGQRDYKDLDARILQFIFDRVKASDELLLNEIYFQAKKLKQKASSELEKLESSKKLDEVIANSQLSKILKSQHTNGIFEQGTFLHLVCKYYKQRQRARDSRLYIMPEYRYDKKLDKYNNTGRFDDDNQLLTYCNHKPRQKRYQLLNDLAGVLQVSPNFLKDKIGSDDDLFISKWLVEHIRGFKKACEDSLKIQKDNRGLLNHKINIARNTKGKCEKEIFNLICKIEGSEDKKGNYKHGLAYELGVLLFGEPNEASKPEFDRKIKKFNSIYSFAQIQQIAFAERKGNANTCAVCSADNAHRMQQIKITEPVEDNKDKIILSAKAQRLPAIPTRIVDGAVKKMATILAKNIVDDNWQNIKQVLSAKHQLHIPIITESNAFEFEPALADVKGKSLKDRRKKALERISPENIFKDKNNRIKEFAKGISAYSGANLTDGDFDGAKEELDHIIPRSHKKYGTLNDEANLICVTRDDNKNKGNRIFCLHDLANNYKLKQFETTDDLEIEKKIADTIWDASKKDFKFGNYRSFINLTPQEQKAFRHALFLADENPIKQAVIRAINNRNRTFVNGTQRYFAEVLANNIYLRAKKENLNTDKISFDYFGIPTIGNGRGIAEIRQLYEKVDSDIQVYAKGDKPQASYSHLIDAMLAFCIAADEHRNDGSIGLEIDKNYSLYPLDKNTGEVFTKDIFSQIKITDNEFSDKKLVRKKATEGFNTHRQMTRDGIYAENYLPILIHKELDEVRKGYTWKNSEEIKIFKGKKYDIQQLNNLLYCLKFVDKPISIDIQISTLEELRNILTTNNIAATAEYYYINLKTQKLHEYYIENYNTALGYKKYTKEMEFLRSLAYRSERVKIKSIDDVKQVLDKDSNFIIGKITLPFKKEWQRLYREWQNTTIKDDYEFLKSFFNVKSITKLHKKVRKDFSLPISTNEGKFLVKRKTWDNNFIYQILNDSDSRVDGTKPFIPAFDISKNEIVEAIIDSFTSKNIFWLPKNIELQKVDNKNIFAIDTSKWFEVETPSDLRDIGVATIQYKIDNNSRPKVRVKLDYVIDDDSKINYFTNHSLLKSRYPDKVLEILKQSTIIEFESSGFNKTIKEMLGMTLAGIYNETSNN

SEQ ID NO: 964 - protein, 1629 aa, Francisella novicida
MNFKILPIAIDLGVKNTGVFSAFYQKGTSLERLDNKNGKVYELSKDSYTLLMNNRTARRHQRRGIDRKQLVKRLFKLIWTEQLNLEWDKDTQQAISFLFNRRGFSFITDGYSPEYLNIVPEQVKAILMDIFDDYNGEDDLDSYLKLATEQESKISEIYNKLMQKILEFKLMKLCTDIKDDKVSTKTLKEITSYEFELLADYLANYSESLKTQKFSYTDKQGNLKELSYYHHDKYNIQEFLKRHATINDRILDTLLTDDLDIWNFNFEKFDFDKNEEKLQNQEDKDHIQAHLHHFVFAVNKIKSEMASGGRHRSQYFQEITNVLDENNHQEGYLKNFCENLHNKKYSNLSVKNLVNLIGNLSNLELKPLRKYFNDKIHAKADHWDEQKFTETYCHWILGEWRVGVKDQDKKDGAKYSYKDLCNELKQKVTKAGLVDFLLELDPCRTIPPYLDNNNRKPPKCQSLILNPKFLDNQYPNWQQYLQELKKLQSIQNYLDSFETDLKVLKSSKDQPYFVEYKSSNQQIASGQRDYKDLDARILQFIFDRVKASDELLLNEIYFQAKKLKQKASSELEKLESSKKLDEVIANSQLSQILKSQHTNGIFEQGTFLHLVCKYYKQRQRARDSRLYIMPEYRYDKKLHKYNNTGRFDDDNQLLTYCNHKPRQKRYQLLNDLAGVLQVSPNFLKDKIGSDDDLFISKWLVEHIRGFKKACEDSLKIQKDNRGLLNHKINIARNTKGKCEKEIFNLICKIEGSEDKKGNYKHGLAYELGVLLFGEPNEASKPEFDRKIKKFNSIYSFAQIQQIAFAERKGNANTCAVCSADNAHRMQQIKITEPVEDNKDKIILSAKAQRLPAIPTRIVDGAVKKMATILAKNIVDDNWQNIKQVLSAKHQLHIPIITESNAFEFEPALADVKGKSLKDRRKKALERISPENIFKDKNNRIKEFAKGISAYSGANLTDGDFDGAKEELDHIIPRSHKKYGTLNDEANLICVTRGDNKNKGNRIFCLRDLADNYKLKQFETTDDLEIEKKIADTIWDANKKDFKFGNYRSFINLTPQEQKAFRHALFLADENPIKQAVIRAINNRNRTFVNGTQRYFAEVLANNIYLRAKKENLNTDKISFDYFGIPTIGNGRGIAEIRQLYEKVDSDIQAYAKGDKPQASYSHLIDAMLAFCIAADEHRNDGSIGLEIDKNYSLYPLDKNTGEVFTKDIFSQIKITDNEFSDKKLVRKKAIEGFNTHRQMTRDGIYAENYLPILIHKELNEVRKGYTWKNSEEIKIFKGKKYDIQQLNNLVYCLKFVDKPISIDIQISTLEELRNILTTNNIAATAEYYYINLKTQKLHEYYIENYNTALGYKKYSKEMEFLRSLAYRSERVKIKSIDDVKQVLDKDSNFIIGKITLPFKKEWQRLYREWQNTTIKDDYEFLKSFFNVKSITKLHKKVRKDFSLPISTNEGKFLVKRKTWDNNFIYQILNDSDSRVDGTKPFIPAFDISKNEIVEAIIDSFTSKNIFWLPKNIELQKVDNKNIFAIDTSKWFEVETPSDLRDIGVATIQYKIDNNSRPKVRVKLDYVIDDDSKINYFTNHSLLKSRYPDKVLEILKQSTTIEFESSGFNKTIKEMLGMTLAGIYNETSNN

SEQ ID NO: 965 - protein, 244 aa, Francisella tularensis
ARKQNSEIYNKLMQKILEFKLRKLCTDIKDDKVSTKTLKEITSYEFELLADYLANYSESLKTQKFSYTDKQGNLKELSYYHHDKYNIQEFLKRHATINDEILDTLLTDDFDIWNFNFEKFDFDKNEEKLQNQEDKDHTQAYLHHFVFAVNKIKSEMASGGRHRSQYFQEITNVLDENNHQEGYLKNFCENLHNKKYSNLSVKNLVNLVGNLSNLELKPLRKYFNDKNLIIGMSKSLQKLIATGY

SEQ ID NO: 966 - protein, 501 aa, Francisella tularensis
MEIEKKIADTIWDASKQDFKFGNYRSFINLTPQEQKAFRYALFLADENSIKQAVIRAINNRNRTFVNGTQRYFAEVLANNIYLRAKKENLNTDKISFDYFGIPTIGNGRGIADIRQLYEKVDSDIQAYAKGDKPQASYSHLIDAMIAFCVAADEHRNDGSIGLEIDKNYSLYLLDKNTGEVFTKDIFSQIKITDNEFSDKKLVRKKATEGFNTHRQMTRDGIYAENYLPILIHKELDEVRKGYTWGNSEELKIHKGKKYNIQQLNNIVYCLKFIDKSISIDIQISTLEELRNILTTNNIAATAEYYYINLKNQKLHEYYIENYNTALDYKKYSKEMEFLRSLAYRSERVKIKSIDDVKQVLDKDSNFIIGKITLPFKKEWQRLYLEWQNTTIKDDYEFLKSFFNVKSITKLHKKVRKDFSLPISTNEGKFLVKRKTWDNNFIYQILNDSDSRVDGTKPFIPAFDISKNEIVEAIIDSFTSKNIFWLPKNIELQNVDKIFLL

SEQ ID NO: 967 - protein, 158 aa, Francisella tularensis
MIDFLLELDPCITIPPYLDNNNRKPPKCQSLILNPKFLDNQYPNWQQYLQELKKLQSIQDYLDSFETDLKDLKSSKDQPYFVEYKSSNQQMASGQRDYKDLDARILQFIFDRVKASDELLLNEIYFQAKKLKQKASSELEKLESSKKLDEVIANSQLS

SEQ ID NO: 968 - protein, 878 aa, Francisella tularensis
MLNDLAGVLQVSRNQLLSSVEEWFQQAQRVGEISKSQDEQIFEWLKSFKIASYCKAAVEMQKQYRGTLKNAIQTAIFRQSENINKNKNKNKNTGNQQQALSENSKDVKSLTADEKKLLKLIENIAKASQKIGESLGLNDKQIKKFNSIYNFAQIQQIAFAERKGNANTCAVYSADNAHRMQQIKITELVEDNKDNIILSAKAQRLPAIPTRIVDGAVKKMATILAKNIVDDNWQNIKQVLSAKHQLHIPIITESNAFEFEPALADVKGKSLKDRRKKALERISPENIFKDKNNRIKEFAKGISAYSGANLTDGDFDGAKEELDHIIPRSYKKYGTLNDEVNLICVTRDDNKNKGKRIFCLNDLANNYKLKQFETTDDLEIEKKIADTIWDASKQDFKFGNYRSFINLIPQEQKAFRYALFLADENSIKQAVIRAINNRNRTFVNGTQRYFAEVLANNIYLRAKKENLNTDKISFDYFGIPTIGNGRGIADIRQLYEKVDSDIQAYAKGDKPQASYSHLIDAMIAFCVAADEHRNDGSIGLEIDKNYSLYPLDKNTGEVFTKDIFSQIKITDNEFSDKKLVRKKATEGFNTHRQMTRDGIYAENYLPILIHKELDEVRKGYTWGNSEELKIHKGKKYNIQQLNNIVYCLKFIDKSISIDIQISTLEELRNILTTNNIAATAEYYYINLKNQKLHEYYIENYNTALDYKKYSKEMEFLRSLAYRSERVKIKSIDDVKQVLDKDSNFIIGKITLPFKKEWQRLYLEWQNTTIKDDYEFLKSFFNVKSINKLHKKVRKDFSLPISTNEGKFLVKRKTWDNNFIYQILNDSDSRVDGTKPFIPAFDISKNEIVEAIIDSFTSKNIFWLPKNIELQKVDKIFLL

SEQ ID NO: 969 - protein, 292 aa, Francisella tularensis
MLNDLAGVLQVSRNQLLSSVEEWFQQAQRVGEISKSQDEQIFEWLKSFKIASYCKAAVEMQKQYRGTLKNAIQTAIFRQSENINKNKNKNTGNQQQALSENSKDVKSLTADEKKLLKLIENIAKASQKIGESLGLNDKQIKKFNSIYNFAQIQQIAFAERKGNANTCAVYSADNAHRMQQIKITELVEDNKDNIILSAKAQRLPAIPTRIVDGAVKKMVTILAKNIVDDNWQNIKQVLSAKHQLHIPIITESNAFEFEPALADVKGKSLKDRRKKALERISPENIFKDKNIC

SEQ ID NO: 970 - protein, 53 aa, Francisella tularensis
MNHSLLKSRYPDKVLEILKQSTIIEFESSGFNKTIKEMLGMTLAGIYNETSNN

SEQ ID NO: 971 - protein, 393 aa, Francisella tularensis
MNVKILPIAIDLDVKNTGVFSAFYQKGTSLEKLDNKNGKVYELSKDSYTLLMNNRTAQRHQRRGIDRKQLVKRLFKLVWTEQLNLEWDKDTQQAISFLFNRRGFSFITDGYSTEYLNIVPEQVKAILMDIFDDYNGEDDLDSYLKLATEQESKISEIYNKLMQKILEFKLRKLCTDIKDDKVSTKTLKEITSYEFELLADYLANYSESLKTQKFSYTDKQGNLKELSYYHHDKYNIQEFLKRHATINDEILDTLLTDDFDIWNFNFEKFDFDKNEEKLQNQEDKDHTQAYLHHFVFAVNKIKSEMASGGRHRSQYFQEITNVLDENNHQEGYLKNFCENLHNKKYSNLSVKNLVNLVGNLSNLELKPLRKYFNDKNLIIGMSKSLQKLIATGY

SEQ ID NO: 972 - protein, 1629 aa, Francisella tularensis
MNVKILPIAIDLGVKNTGVFSAFYQKGTSLERLDNKNGKVYELSKDSYTLLMNNRTARRHQRRGIDRKQLVKRLFKLIWTEQLNLEWDKDTQQAISFLFNRRGFSFITDGYSPEYLNIVPEQVKAILMDIFDDYNGEDDLDSYLKLATEQESKISEIYNKLMQKILEFKLRKLCTDIKDDKVSTKTLKEITSYEFELLADYLANYSEILKTQKFSYTDKQGNLKELSYYHHDKYNIQEFLKRHATINDEILDTLLTDDLDIWNFNFEKFDFDKNEEKLQNQEDKDHTQAHLHHFVFAVNKIKSEMASGGRHRGQYFQEITNVLDENNHQEGYLKNFCENLHNKKYSNLSVKNLVNLIGNLSNLELKPLRKYFNDKIHAKADHWDEQKFTETYCHWILGEWRVGVKDQDKKDGAKYSYKDLCNELKQKVTKAGLVDFLLELDPCRTIPPYLDNNNRKPPKCQSLILNPKFLDNQYPNWQQYLQELKKLQSIQNYLESFETDLKVLKSSKDQPYFVEYKSSNQQIASGQRDYKDLDARILQFIFDRVKASDELLLNEIYFQAKKLKQKASSELEKLESSKKLDEVIANSQLSQILKSQHTNGIFEQGTFLHLVCKYYKQRQRARDSRLYIMPEYRYDKKLDKYNNTGRFDDDNQLLTYCNHKPRQKRYQLLNDLAGVLQVSPNFLKDKIGSDDDLFISKWLVEHIRGFKKACEDSLKIQKDNRGLLNHKINIARNTKGKCEKEIFNLICKIEGSEDKKGNYKHGLAYELGVLLFGEPNEASKPEFDRKIKKFNSIYSFAQIQQIAFAERKGNANTCAVCSADNAHRMQQIKITEPVEDNKDKIILSAKAQRLPAIPTRIVDGAVKKMATILAKNIVDDNWQNIKQVLSAKHQLHIPIITESNAFEFEPALADVKGKSIKDRRKKALERISPENIFKDKNNRIKEFAKGISAYSGDNLASGDFDGAKEELDHIIPRSHKKYGTLNDEANLICVTRDDNKNKGNRIFCLHDLANNYKLKQFETTDDLEIEKKIADTIWDASKKDFKFGNYRSFINLTPQEQKAFRHALFLADENPIKQAVIRAINNRNRTFVNGTQRYFAEVLANNIYLRAKKENLNTDKISFDYFGIPTIGNGRGIVEIRQLYEKVDSDIQAYAKGDKPQASYSHLIDAMLAFCIAADEHRNDGSIGLEIDKNYSLYPLDKNTGEVFTKDIFSQIKITNNEFSDKKLVRKKATEGFNTHRQMTRDGIYAENYLPILIHKELDEVRKGYTWGNSEELKIHKGKKYDIQQLNNLVYCLKFIDKSISIDIQISTLEELRNILTTNNIATTAEYYYINLKTQKLHEYYIENYNTALGYKKYTKEMEFLRSLAYRSERVKIKSIDDVKQVLDKDSNFIIGKITLPFKKEWQRLYREWQNTTIKDDYEFLKSFFNVKSITKLHKKVRKDFSLPISTNEGKFLVKRKTWDNNFIYQILNDSDSRVDGTKPFIPAFDISKNEIVEAIIDSFTSKNIFWLPKNIELQKVDNKNIFAIDTSKWFEVETPSDLRDIGVATIQYKIDNNSRPKVRVKLDYVIDDDSKINYFTNHSLLKSRYPDKVLEILKQSTIIEFESSGFNKTIKEMLGMTLAGIYNETSNN

SEQ ID NO: 973 - protein, 285 aa, Francisella tularensis
MTRDGIYAENYLPILIHKELDEVRKGYTWGNSEELKIHKGKKYNIQQLNNIVYCLKFIDKSISIDIQISTLEELRNILTTNNIAATAEYYYINLKNQKLHEYYIENYNTALDYKKYSKEMEFLRSLAYRSERVKIKSIDDVKQVLDKDSNFIIGKITLPFKKEWQRLYLEWQNTTIKDDYEFLKSFFNVKSITKLHKKVRKDFSLPISTNEGKFLVKRKTWDNNFIYQILNDSDSRVDGTKPFIPAFDISKNEIVEAIIDSFTSKNIFWLPKNIELQKVDKIFLL

SEQ ID NO: 974 - protein, 1323 aa, Fructobacillus fructosus
MVYDVGLDIGTGSVGWVALDENGKLARAKGKNLVGVRLFDTAQTAADRRGFRTTRRRLSRRKWRLRLLDELFSAEINEIDSSFFQRLKYSYVHPKDEENKAHYYGGYLFPTEEETKKFHRSYPTIYHLRQELMAQPNKRFDIREIYLAIHHLVKYRGHFLSSQEKITIGSTYNPEDLANAIEVYADEKGLSWELNNPEQLTEIISGEAGYGLNKSMKADEALKLFEFDNNQDKVAIKTLLAGLTGNQIDFAKLFGKDISDKDEAKLWKLKLDDEALEEKSQTILSQLTDEEIELFHAVVQAYDGFVLIGLLNGADSVSAAMVQLYDQHREDRKLLKSLAQKAGLKHKRFSEIYEQLALATDEATIKNGISTARELVEESNLSKEVKEDTLRRLDENEFLPKQRTKANSVIPHQLHLAELQKILQNQGQYYPFLLDTFEKEDGQDNKIEELLRFRIPYYVGPLVTKKDVEHAGGDADNHWVERNEGFEKSRVTPWNFDKVFNRDKAARDFIERLTGNDTYLIGEKTLPQNSLRYQLFTVLNELNNVRVNGKKFDSKTKADLINDLFKARKTVSLSALKDYLKAQGKGDVTITGLADESKFNSSLSSYNDLKKTFDAEYLENEDNQETLEKIIEIQTVFEDSKIASRELSKLPLDDDQVKKLSQTHYTGWGRLSEKLLDSKIIDERGQKVSILDKLKSTSQNFMSIINNDKYGVQAWITEQNTGSSKLTFDEKVNELTTSPANKRGIKQSFAVLNDIKKAMKEEPRRVYLEFAREDQTSVRSVPRYNQLKEKYQSKSLSEEAKVLKKTLDGNKNKMSDDRYFLYFQQQGKDMYTGRPINFERLSQDYDIDHIIPQAFTKDDSLDNRVLVSRPENARKSDSFAYTDEVQKQDGSLWTSLLKSGFINRKKYERLTKAGKYLDGQKTGFIARQLVETRQIIKNVASLIEGEYENSKAVAIRSEITADMRLLVGIKKHREINSFHHAFDALLITAAGQYMQNRYPDRDSTNVYNEFDRYTNDYLKNLRQLSSRDEVRRLKSFGFVVGTMRKGNEDWSEENTSYLRKVMMFKNILTTKKTEKDRGPLNKETIFSPKSGKKLIPLNSKRSDTALYGGYSNVYSAYMTLVRANGKNLLIKIPISIANQIEVGNLKINDYIVNNPAIKKFEKILISKLPLGQLVNEDGNLIYLASNEYRHNAKQLWLSTTDADKIASISENSSDEELLEAYDILTSENVKNRFPFFKKDIDKLSQVRDEFLDSDKRIAVIQTILRGLQIDAAYQAPVKIISKKVSDWHKLQQSGGIKLSDNSEMIYQSATGIFETRVKISDLL

SEQ ID NO: 975 - protein, 1367 aa, Fusobacterium sp.
MKKQKFSDYYLGFDIGTNSVGWCVTDLDYNVLRFNKKDMWGSRLFDEAKTAAERRVQRNSRRRLKRRKWRLNLLEEIFSDEIMKIDSNFFRRLKESSLWLEDKNSKEKFTLFNDDNYKDYDFYKQYPTIFHLRDELIKNPEKKDIRLIYLALHSIFKSRGHFLFEGQNLKEIKNFETLYNNLISFLEDNGINKSIDKDNIKKLEKIICDSGKGLKDKEKEFKEIFNSDKQLVAIFKLSVGSSVSLNDLFDTDEYKKEEVEKEKISFREQIYEDDKPIYYSILGEKIELLDIAKSFYDFMVLNNILSDSNYISEAKVKLYEEHKKDLKNLKYIIRKYNKENYDKLFKDKNENNYPAYIGLNKEKGKKEVVEKSGLKIDDLIKVIKGYLPKPERIEEKDKTIFNEILNKIELKTILPKQRISDNGTLPYQIHEVELEKILENQSKYYDFLNYEENGVSTKDKLLKTFKFRIPYYVGPLNSYHKDKGGNSWIVRKEEGKILPWNFEQKVDIEKSAEEFIKRMTNKCTYLNGEDVIPKDSFLYSEYIILNELNKVQVNDEFLNEENKRKIIDELFKENKKVSEKKFKEYLLVNQIANRTVELKGIKDSFNSNYVSYIKFKDIFGEKLNLDIYKEISEKSILWKCLYGDDKKIFEKKIKNEYGDILNKDEIKKINSFKFNTWGRLSEKLLTGIEFINLETGECYSSVMEALRRTNYNLMELLSSKFTLQESIDNGNKEMNEVSYRDLIEESYVSPSLKRAILQTLKIYEEIKKITGRVPKKVFIEMARGGDETMKNKKIPARQEQLKKLYDSCGNDIANFSIDIKKMKSSLSSYDNNSLRQKKLYLYYLQFGKCMYTGREIDLDRLLQNNDTYDIDHIYPRSKVIKDDSFDNLVLVLKNENAEKSNEYPVKKEIQEKMKSFWRFLKEKNFISDEKYKRLTGKDDFELRGFMARQLVNVRQTTKEVGKILQQIEPEIKIVYSKAEIASSFREMFDFIKVRELNDTHHAKDAYLNIVAGNVYNTKFTEKPYRYLQEIKENYDVKKIYNYDIKNAWDKENSLEIVKKNMKKNTVNITRFIKEEKGQLFDLNPIKKGETSNEIISIKPKLYNGKEEKLNEKYGYYKSLNPAYFLYVEHKEKNKRIKSFERVNLVDVNNIKDEKSLVKYLIENKKLVEPRLIKKVYKRQVILINDYPYSIVALDSNKLMDFENLKPLFLENKYEKILKNVIKFLEDNQGKSEENYKFIYLKKKDRYEKNETLESVKDRYNLEFNEMYDKFLEKLDSKDYKNYINNKKYKNLLDVKEKFIKLNLFDKAFTLKSFLDLFNRKTMADFSKVGLTKYLGKIQKISSNVLSKNELYLLEESVTGLFVKKIKL

SEQ ID NO: 976 - protein, 1367 aa, Fusobacterium sp.
MKKQKFSDYYLGFDIGTNSVGWCVTDLDYNVLRFNKKDMWGSRLFDEAKTAAERRVQRNSRRRLKRRKWRLNLLEEIFSDEIMKIDSNFFRRLKESSLWLEDKNSKEKFTLFNDDNYKDYDFYKQYPTIFHLRDELIKNPEKKDIRLIYLALHSIFKSRGHFLFEGQNLKEIKNFETLYNNLISFLEDNGINKSIDKDNIKKLEKIICDSGKGLKDKEKEFKEIFNSDKQLVAIFKLSVGSSVSLNDLFDTDEYKKEEVEKEKISFREQIYEDDKPIYYSILGEKIELLDIAKSFYDFMVLNNILSDSNYISEAKVKLYEEHKKDLKNLKYIIRKYNKENYDKLFKDKNENNYPAYIGLNKEKGKKEVVEKSGLKIDDLIKVIKGYLPKPERIEEKDKIIFNEILNKIELKTILPKQRISDNGTLPYQIHEVELEKILENQSKYYDFLNYEENGVSTKDKLLKTFKFRIPYYVGPLNSYHKDKGGNSWIVRKEEGKILPWNFEQKVDIEKSAEEFIKRMTNKCTYLNGEDVIPKDSFLYSEYIILNELNKVQVNDEFLNEENKRKIIDELFKENKKVSEKKFKEYLLVNQIANRTVELKGIKDSFNSNYVSYIKFKDIFGEKLNLDIYKEISEKSILWKCLYGDDKKIFEKKIKNEYGDILNKDEIKKINSFKFNTWGRLSEKLLTGIEFINLETGECYSSVMEALRRTNYNLMELLSSKFTLQESIDNGNKEMNEVSYRDLIEESYVSPSLKRAILQTLKIYEEIKKITGRVPKKVFIEMARGGDETMKNKKIPARQEQLKKLYDSCGNDIANFSIDIKKMKSSLSSYDNNSLRQKKLYLYYLQFGKCMYTGREIDLDRLLQNNDTYDIDHIYPRSKVIKDDSFDNLVLVLKNENAEKSNEYPVKKEIQEKMKSFWRFLKEKNFISDEKYKRLTGKDDFELRGFMARQLVNVRQTTKEVGKILQQIEPEIKIVYSKAEIASSFREMFDFIKVRELNDTHHAKDAYLNIVAGNVYNTKFTEKPYRYLQEIKENYDVKKIYNYDIKNAWDKENSLEIVKKNMKKNTVNITRFIKEEKGQLFDLNPIKKGETSNEIISIKPKLYNGKEEKLNEKYGYYKSLNPAYFLYVEHKEKNKRIKSFERVNLVDVNNIKDEKSLVKYLIENKKLVEPRLIKKVYKRQVILINDYPYSIVALDSNKLMDFENLKPLFLENKYEKILKNVIKFLEDNQGKSEENYKFIYLKKKDRYEKNETLESVKDRYNLEFNEMYDKFLEKLDSKDYKNYINNKKYKNLLDVKEKFIKLNLFDKAFTLKSFLDLFNRKTMADFSKVGLTKYLGKIQKISSNVLSKNELYLLEESVTGLFVKKIKL

SEQ ID NO: 977 - protein, 1367 aa, Fusobacterium sp.
MKKQQFSDYYLGFDIGTNSVGWCVTDFNYNVLRFNKKDMWGSRLFDEAKTAAERRVQRNSRRRLKRRKWRLNLLEEIFSDEILKIDSNFFRRLKESSLWLEDKSSKEKFTLFNDDNYKDYDFYKQYPTIFHLRNELIKNPEKKDIRLVYLALHSIFKSRGHFLFEGQNLKDIKNFETLYNNLMAFLEDNDIYKNIDSSYIGNLENIICDSKKGLKDKEKEFKEIFNSDKQLVGFFKLSVGSSVSLNDLFDTDEYKKGEVEKEKISFREQIYEDDKPIYYSILGEKIEFLDIAKSFYDFMVLNNILADSQYISEAKVKLYDEHKRDLKNLKYIIRKYNKENYDKLFKDKNESNYSAYIGLNKEKGKKEVIEKSRLKIDDFAKIIKGYLPKAEKIDEKDRSIFNEILDKIELKTILPKQRISDNGTLPYQIHEAELEKILENQAKYYDFLNHEENGISTKDKLLMTFKFRIPYYVGPLNSYHKNKGGNSWIVRKEEGKILPWNFEQKVDIEKSAEEFIKRMTNKCTYLNGEDVIPKDSFLYSEYIILNELNKVQVNDEFLNKEIKKKIIEDLFKKSKKISEKNFREYLLVNQITNKTVELKGVKDAFNSNYVSYIKFKDIFGDKLNLDIYKEISEKSILWKCLYGDDKKIFEKKIKSVYGDILTKDEIKKINSFKFNTWGRLSEKLLTEIEFIDLETGECYSSVMDALRRTNYNLMELLSSKFTLQENIDNENKEVSEFSYRDLVEESYVSPSLKRAILQTLKIYEEIRKITGRIPKKVFIEMARGGDETMKNKKIPARQEQLKKLYDSCGKDISNFSIDIKEMKNSLNSYDNNSLRQKKLYLYYLQFGKCMYTGKEIDLNRLLQNNDTYDIDHIYPRSKVIKDDSFDNLVLVLKNENAEKSNEYPLKKEIQEKMKSFWKFLKEKNFISDEKYKRLTGKDEFELRGFMARQLVNVRQTTKEAGKILQQIEPEIKIVYSKAEIASSFREMFDFIKVRELNDTHHAKDAYLNIVAGNVYNTKFTEKPYRYLQEIKENYDVKKIYNYDIKNAWDKEKSLEIVKKNMEKNTVNITRFIKEEKGQLFDLNPIRKGETSNEIIAIKPKFYEGSTEKLNEKYGYYKSLNPAYFIYVEHKEKNKIIRSFERVNLVDVNKIKDEKSLIKYLIENKGLIEPKVIKKVYKRQVILINNFPYSIVALDSNKLMDFENLKPLFLERKYEKILKNAIKFLEDNQGKTEEYYKFLYLKKKDRNEKNETIDSVKERYNIEFNEMYDKFLEKLDSKDYKNYINNKKYSELVNVKEKFIKLNLFDKAFTLKSFLDLFNRKTMADFSKVGLTKYLGKIQKISSNVLSKNELHLLEESVTGLFVKKIKL

SEQ ID NO: 978 - protein, 1391 aa, Galbibacter sp.
MKTILGLDLGTNSIGWALVKEAENENEVSDIIKLGVRVNPLTVDELTNFEGGKAYSNNAERTLKRGARRNLQRYKLRRENLIEILLKNGLINKDTALTEVGKETTHQTLKLRSKSANEKVSLEDLAKILLSINKKRGYKSSRKVNAEDDGVAIDGMEVAKLLYDENMTPGEYVLRLLESGKKHLPDFYRSDLQEEFNLVWKKQSEFYPLILTKELFFELHGKNKSQTWAICKEPLGIVGVKLKGSAKEQKFARYRLRKEALTQQIELEHLAIVLQDINNDSNKSSGYLGAISDRSKELFFNKETVGQYQYKQLQKDPNTSLKNQVFYRQDYLDEFEVIWRNQAKFYPQLTNELKQEIRDVVIFYQRKLKSQKNLISFCQFESTQQNYVEKETGKTKIRTIGRRVIPRSSPLFQEFKIWQSLNNLKFVNSESNQIIQFIELEDDVKKVVFDELNLRGDLKPNQVLKILSKYMKIGKLTQWKCNLEEIEGNRTNSALYNVFQMIAEEEGYGFNWGKKSALEIKSELKAIFSSIGINDSILDFDFSKKLDQQLSYQLWHLLYSAEEGNSKITEEDKFTYGNTGVALKKKLHLKFGFKPEYSTLISNLRFTSDYGNLSSKAISKILPFLRDGSDYSKACQYAGYNHSNSLSADELDNRELKPKLELLKKNSLRNPVVEKILNQMVNVVNQVIDNYGKPDEVRIELARELKKSAKERSQMTKNISDATRRNAEIKKYLSKEFGIPNPTKGDVIRYRLWEELASNGYKDLFRDKYIPKEKLFSNEIDIEHIIPKALLFDDSFSNKTLAFKVDNLKKADRTAFDFMSTDFSKDVDSYIGRIETLHKDGKISSSKYKKLMIPKSKLVDGFIERDLRNTQYIAKQARKMLLEVFKTVVPTTGKITDKLREDWDLINVMKELNFPKYKALGLTKKIERFDVGSEKIKSINVIEGWSKRNDHRHHAMDALAVAFTTHNHIQYLNYLNARKDIHHEMHGTIKSIENQIIGKDVMGKRRFIPPISDLRMKAKLQIESILISFKNKNKVVTWSVNKTKLKGKDNYNKRRQLTPRGQLHKETVYGKIKLIDPKPLKLNNKFTLVRASMIVDKVHREIVLQHLSKYDNNSEVAFDSKTIKIDPILIEGIGLKEVVCYEDVFKIRKKISGDNFKNEKHLEKVIDEKVKQILKDRVIKFQGNFKEAFSNLEENPIWLNKSKGIAVKSVAIKGVNNAESLHEGKDHFGDQILDKNKKQIPVDFVSTGNNHHVGIYEDKDGNLQERVVSFFEAVTRVNEGLPIIDKTYNSDIGWKFKFTMKQNEMFVFPSDDFDPNEFDLTDGKNAAKISPNLYRVQKIATKNYMFRHHLETVVTNDLEFTYKSIRSTGWLRNLVKVRINHLGEIVYVGEY

SEQ ID NO: 979 - protein, 1186 aa, Gardnerella vaginalis
MEGNISYAIGIDVGLNSVGLAAIRLDDYGEPIRILKAMSVIHDAGIDPNGAKESDTRKAISGVARRVRRLYRQRRRRLQKLDFLLQSLGWPVVENKDLDFSDSFIPWIFRAKLADEYIADEEQRKQMLSVAIRHIARHRGWRNPYQSIKSMMQETEYSEFYNELLKNIEKLAPGVGCEGSTPAQLVRDYLLSQQGKASRRLRITTGGRRKNHPHSLDPVLPRKLMQSDNMLEILNIFNVQHIDDKYVREQIINAVFYAESPRGSAENRVGKDAITGKGKRALKASLAFQKYRIISTISNLRIRENSKERCLTIEEKQNVYKLLTTSIDKSSKRKSAEAPLYTWIDVADCLGIERYKLRGVGSQIGDGESVGNRPPMLNSELAILYANNKSLGQSLITWWLASNRTQEDKEALIEILSNTVDIEAIHDNPEYQDKYGSAIAFIDSMNETEIAALENISLPDGRAAYSLETLDELNKQMLETDDDLFEARKKLFNLPNNWRPAEAPIAEPTGNPSVDRVLKIVHRFLISAKNRWGNPERINIEHVRSGFQSKKMANSYKELLDKRTEGKENLKAMMRNSLHLGTSDSISDADIRRYEAVQRQNGQCLYCGSEITYHTCELDHIVPRKGPGSTNTRENLVATCSSCNAQKCNTPFATWCEQSTYCKNHDISADSAINRVRAFIFPPNSYDKRGANQFKKEVIARLKQKVGDEAFDNRSIESVAWMANELHRRIDWYYNSQNYQTNNGISDISNKAQTNVGVYAGSLTAIARRMSGIDGKLEFFDGRRKTRFDRRHHAVDASVIAMMTPGIAQILAIKCNLRETQLLQGNKVVPGGIDWKEYPTANDQGYQQYANWSVRMNALLKLLNEEMRADRIAVVNSIRLRYSNSSVHQYEVNALLKLHVGDEIDSETIRRSSTPALYCALTRNPDYDVNNGFPENPGRTILLHNKKLNADDSITFFKAQAVQLFVREGSAKIGNSIHHLRIYEYFEKLKSGKIKKSYGMIRVFQNDLHRHIHEDLFSCDLPEQSISMRYADTKVAHAVQTGNANYLGYLVPGDEIIVDFSHITLSENIGKFVEFLNKIGADCTAYRHWVVVGTDTEKVLILKPSMISSEGIDKLYSNCERNNFDYSSYEKSINEILAGKGWRVSVNVLAQYKAATIRRNALGEVRWASRSHLPISWSWDTGENRE

SEQ ID NO: 980 - protein, 1186 aa, Gardnerella vaginalis
MEGNISYAIGIDVGLNSVGLAAIRLDNNGEPIRILKAMSVIHDAGIDPNGAKESDTRKAISGVARRVRRLYRQRRRRLQKLDFLLHSLGFPVVENKDLDFSDSFIPWIFRAKLADEYIADEKQRKQMLSVAIRHIARHRGWRNPYQSIKSMTQETEYSEFYNELLKNIEKFAPGVGCEGSTPAQLVRDYLLLQQGKASRRLRITTDEKRKNHPNSLNPILPRKLMQSDNMLEILNIFNVQHIDDKYVREQIINAVFYAKSPRGSAENRVGKDAITGKGKRALKASLAFQKYRIISTISNLRIRENSKERCLTIEEKQSVYKLLTTSTDESSKEKSAEAPLYTWIDVADCLGIERYKLRGVGSQIGDGESVGNRPPMLNSELAIIYANNKSLGKSLLTWWLDANRTQEDKEALIEILSNTVDIEAIHDNPEYQDKYGSAIAFIDSMDETEIAALENISLPDGRAAYSLETLDKLNKQMLETDDDLFEARKKLFNLPNNWRPSEAPIAEPTGNPSVDRVLKIVHRFLISAKNRWGNPERINIEHVRSGFKSKKMANSYKELLDKRTKGKENLKAMMRNSLHLGMSDSISDADIRRYEAVQRQNGQCLYCGSEITYHTCELDHIVPRKGPGSTNTRENLVATCSLCNAQKCNTPFSTWCEQSTYCKNHDISVDSAINRVRAFIFPPNSYDKRGANQFKKEVIARLKQKVGDEAFDNRSIESVAWMANELHRRIDWYYNSQNYQTNNGISDITNKAQTNVGVYAGSLTAIARRMSGIDGKLEFFDGRRKTRFDRRHHAVDASVIAMMTPGIAQILAIKCNLRETQLLQGNKVVPGGIDWKEYPTANDQGYQQYANWSVRMNALLKLLNEEMRADRIAVVNSIRLRYNNSSVHQYKVNALLKLHVGDEIDSGTIRRSSTPALYCALTRNPDYDVNNGLPENPNRAILLHDKKLNADDSITFFKAQAVQLFVREGSAEIGSSTHHLRIYEYFKKLKSGKIKKSYGMIRVFQNDLHRHIHEDLFSCDLPEQSISMRYADTEVAHAVQTGNSNYLGYLVPGDEIIVDFSHVKLSGNIGTFVEFLNKIGANCAAYNHWVVVGTDTEKVLILKPSMISSEGIDKLYSNCKRNNFDYSSYEKSINEILVGKGWRVSVNVLAKYNAETIRRNALGEVRWTSRSHLPISWSWNTGENRE

SEQ ID NO: 981 - protein, 1258 aa, Gemella haemolysans
MTEENPDIRKVFLAIHHILKNRGHFLLQGQSFKEGNLNNLIKELLNLDILHISIEITEENINKITEIALEKKTLTDKVNDLKKIYPKEKQLLEAFRLIFGGKTSLDKLFAIDEYKELDASVKSVSFKEKIYEEVRHDYEQVLSNYIELLDLAKLVYDSIILSDIKKEGKTLSESKVELYHKHREDLTKLKTLVKNDSKLSEDKKVELYSAIFKEDKDKGTNYVNYIRKSEEGKGCNYEDFKKFLVKELAKLEESSAKEEILRDLELELFLPLQRTKDNSVVPYQIHKEELVKILDNAAKYHKFLNEKDDSGYSIIEKVIQLLEFRIPYYVGPLNSSKKAKVDGFAWSVRNKGYENTPVTPWNYEKVIDESASAEKFITNLTNKCTYLKGEDVLPKSSLLYSEFALLNELNALKYDGNRISLEARNVIIEKLFKEQGKKVTKTSIKNLLKAEGYIDGKGEITGIDITVKNDLKSYRDFKKILGDKFNTEHVENIILWITLYGESRKLIKAKIEAVYGDIYSKEEIAKMSRLVYKDWGRFSRKLLTELVSKKLYNEETGECLNIIGAMRQNNILFMELLADRFDYSQQIIDYNKELQKEVTEITPEILDDLYVSPSVKRSIWQTVRIVEELKKIIGCAPAKIFVETTRSNQDKKKPTDSRKKQLELFYKAVKKDVKDLEKEIGSLNFDKLNERLSSVEPSKLKAKKLYLYYTQLGRCMYSGETIDITQLNTTAYDIDHIYPQSKVKDDSFTNTVLVKREYNAAKTDRYPLGSDIQTPSNRRFWKFLKEKGLITDEKYNRLVRTEEFSDEELTGFIARQLVETSQSVKAVAGILGELNPKTSICYSKAENVSSFRQNFGKIKEGNRKSDNTEQLIKVREINDYHHAKDAYLNVVVGNVYDTKFTRNVFNFIKDKKDGRKYSLNNVFYENVSNSNNVAWELNKTVHQVEKVMNNNNILVTRRTSEQKGGLFDATVYKAKVAAKAKEGVYYPLKTSDPVVNDVTKYGGFTKVKIAYYSIFEYTLVNKKGEEKITRIIPIPIYVSQNIKDDSTLLEFGKTQINIKSGEEVKDFKLKYRKLCIGDLVKINNFFNFIGGKTNDSFVYDGAVQVTLDTESERYIKTLSKYQNWKKENKDGELWESITKEKNTELYNLLVEKMNSGIFIKKKPNKFNELNSEEIRNNFSSISLEEQAKVLLEVLNLLTNKKSIFDLKSINITAARGKISFNLSNLSQFSIIEQSVAGFYEKEITIIGDKENDMENNNC

SEQ ID NO: 982 - protein, 1054 aa, Haemophilus parainfluenzae
MENKNLNYILGLDLGIASVGWAVVEIDEKENPLRLIDVGVRTFERAEVPKTGESLALSRRLARSARRLTQRRVARLKKAKRLLKSENILLSTDERLPHQVWQLRVEGLDHKLERQEWAAVLLHLIKHRGYLSQRKNESKSENKELGALLSGVDNNHKLLQQATYRSPAELAVKKFEVEEGHIRNQQGAYTHTFSRLDLLAEMELLFSRQQHFGNPFASEKLLENLTALLMWQKPALSGEAILKMLGKCTFEDEYKAAKNTYSAERFVWITKLNNLRIQENGLERALNDNERLALMEQPYDKNRLFYSQVRSILKLSDEAIFKGLRYSGEDKKAIETKAVLMEMKAYHQIRKVLEGNNLKAEWAELKANPTLLDEIGTAFSLYKTDEDISAYLAGKLSQPVLNALLENLSFDKFIQLSLKALYKLLPLMQQGLRYDEACREIYGDHYGKKTEENHHFLPQIPADEIRNPVVLRTLTQARKVINGVVRLYGSPARIHIETGREVGKSYKDRRELEKRQEENRKQRENAIKEFKEYFPHFAGEPKAKDILKMRLYKQQNAKCLYSGKPIELHRLLEKGYVEVDHALPFSRTWDDSFNNKVLVLANENQNKGNLTPFEWLDGKHNSERWRAFKALVETSAFPYAKKQRILSQKLDEKGFIERNLNDTRYVARFLCNFIADNMHLTGEGKRKVFASNGQITALLRSRWGLAKSREDNDRHHALDAVVVACSTVAMQQKITRFVRFEAGDVFTGERIDRETGEIIPLHFPTPWQFFKQEVEIRIFSDNPKLELENRLPDRPQANHEFVQPLFVSRMPTRKMTGQGHMETVKSAKRLNEGISVIKMPLTKLKLKDLELMVNREREKDLYDTLKARLEAFNDDPAKAFAEPFIKKGGAIVKSVRVEQIQKSGVLVREGNGVADNASMVRVDVFTKGGKYFLVPIYTWQVAKGILPNKAATQYKDEEDWEVMDNSATFKFSLHPNDLVKLVTKKKTILGYFNGLNRATGNIDIKEHDLDKSKGKQGIFEGVGIKLALSFEKYQVDELGKNIRLCKPSKRQPVR

SEQ ID NO: 983 - protein, 1052 aa, Haemophilus parainfluenzae]
MKNTSLNYVLGLDLGISSVGWAVVEIDEKENPLSLIDVGVRTFERAETQKGESLALARRLARSARRLTQRRVARLKKAKRLLKSENILLSTDECLPHQVWQLRVEGLERKLERQEWAAVLLHLIKHRGYLSQRKNESKSENKELGALLSGVANNHKLLQQTTYRTPAELAVKKFEVEEGHIRNQQGSYTHTFSRLDLLSEMELLFSRQQHFGNPFTSEKLLENLTALLMWQKPALSGDAILKMLGKCTFENEYKAAKHTYSAERFIWITKLNNLRIQENGLERALNDNERLALMKQPYEKAKLTYAQVRSILNLSDEAIFKGLRYSGEDKKTSETKTVLMEMKAYHQIRLALEKNDLKTEWAELKVNSSLLDEIGTAFSLYKTDEDISTCLAGKLSQPVLNALLENLNFDKFIQLSLKALHKILPLMQQGLRYDEACAEIYGDHYGKKTEENHLLLPQIPADEIRNPVVLRTLTQARKVINGVVRLYSSPARIHIETGREVGKSYQDRRELEKRQEENRKQREKAISEIKTLFPNFSGEPKAKDILKMRLYYQQNAKCLYSGKPLELHRLLEQGYVEIDHALPFSRTWDDSFNNKVLVLANENQNKGNLTPFEWLDGKNNSERWKAFKALVETSAFPYTKKQRILSQKLDEKGFIERNLNDTRYVARFLCNFIADNMHLTGEGKRKVFASNGQITALLRGRWGLAKSREDNDRHHALDAVVVACSTVSMQQKITRFVRFEEGNVFTGERIDRETGEIIPLHFPAPWKFFREEVEIRIFSDNPKLELENRLIARPQANHEFVQPLFVSRMPTRKMIGQGHMETIKSAKRLNEGLSVIKMLLTKLRLKDLESMVNREREKELYEALKARLEAFNDEPAKAFAEPFMKKGGAIVKSVRVEQVQKSGVLVRDGNGVADNASMVRVDVFTKGGKYFLVPIYTWQVAKGILPNKAVIQGKNEEDWEVMDDATFRFSLHQNDLVKLVTKKKTIFGYFNGLNRATGNIDIKEHDLEKSKVKDGIHQSIGIKLALSFEKYQVDELGKNIRLCKSSKRQAVR

SEQ ID NO: 984 - protein, 121 aa, Haemophilus pittmaniae
MLNRRYAAKITRFVRFEAGDVFTGERIDRETGEIIPLHFPTPWQFFKQEVEIRIFSDNPKLELENRLPDRPQANHEFVQPLFVSRMPTRKMTGQGHMETVKSAKRLNEGISVIKMPLTKLN

SEQ ID NO: 985 - protein, 203 aa, Haemophilus pittmaniae
MVNREREKDLYDALKARLEAFNDDPAKAFAEPFIKKGGAIVKSVRVEQVQKSGVLVREGNGVADNASMVRVDVFTKDGKYFLVPIYTWQVAKGILPNKAATQYKDEEDWEVMDNSAIFKFSLHPNDLVKLVTKKKTILGYFNGLDRATGNIAIKEHDLEKSKAKGGIHQGVGIKLALSFEKYQIDELGKNIRLCNPSKCQSVR

SEQ ID NO: 986 - protein, 1052 aa, Haemophilus sputorum
MKNTSLNYVLGLDLGISSVGWAVVEIDEKENPLSLIDVGVRTFERAETQKGESLALARRLARSARRLTQRRVARLKKAKRLLKSENILLSTDECLPHQVWQLRVEGLERKLERQEWAAVLLHLIKHRGYLSQRKNESKSENKELGALLSGVANNHKLLQQTTYRTPAELAVKKFEVEEGHIRNQQGSYTHTFSRLDLLSEMELLFSRQQHFGNPFTSEKLLENLTALLMWQKPALSGDAILKMLGKCTFENEYKAAKHTYSAERFIWITKLNNLRIQENGLERALNDNERLALMKQPYEKAKLTYAQVRSILNLSDEAIFKGLRYSGEDKKTSETKTVLMEMKAYHQIRLALEKNDLKTEWAELKVNSSLLDEIGTAFSLYKTDEDISTCLAGKLSQPVLNALLENLNFDKFIQLSLKALHKILPLMQQGLRYDEACAEIYGDHYGKKTEENHLLLPQIPADEIRNPVVLRTLTQARKVINGVVRLYSSPARIHIETGREVGKSYQDRRELEKRQEENRKQREKAISEIKTLFPNFSGEPKAKDILKMRLYYQQNAKCLYSGKPLELHRLLEQGYVEIDHALPFSRTWDDSFNNKVLVLANENQNKGNLTPFEWLDGKNNSERWKAFKALVETSAFPYTKKQRILSQKLDEKGFIERNLNDTRYVARFLCNFIADNMHLTGEGKRKVFASNGQITALLRGRWGLAKSREDNDRHHALDAVVVACSTVSMQQKITRFVRFEEGNVFTGERIDRETGEIIPLHFPAPWKFFREEVEIRIFSDNPKLELENRLIARPQANHEFVQPLFVSRMPTRKMTGQGHMETIKSAKRLNEGLSVIKMLLTKLRLKDLESMVNREREKELYEALKARLEAFNDEPAKAFAEPFMKKGGAIVKSVRVEQVQKSGVLVRDGNGVADNASMVRVDVFTKGGKYFLVPIYTWQVAKGILPNKAVIQGKNEEDWEVMDDATFRFSLHQNDLVKLVTKKKTIFGYFNGLNRATGNIDIKEHDLEKSKVKDGIHQSIGIKLALSFEKYQVDELGKNIRLCKSSKRQAVR

SEQ ID NO: 987 - protein, 1338 aa, Helcococcus kunzii
MQDYYLGLDIGTNSVGWAVTDENYNLLRKKGKDLWGVRLFKEAQPATERRGHRSSRRRTIRKSLRKQLLRELFEEEINAIDKDFFLRLDESKYWLEDKKIEGKYSLFNDENFTDKDYYEKFPTIFHLRKALIESDDKEDIRLYFLAINQMMKRRGHFLIDGKLSNVEDITPFKECIQNLINEELDTEIETEFYDKAIKIVSDYSLKKTEKKNLIKDLVKETDSIEDSKKIINIFNLLISGKSKVNGIFDDEEILEKIKEDNKEDFYLTSEKYEENLEYFSQLLDYRFELISSLKSIYDYIILQEVLKGKKYLSYAQVERYKNHKEDLRKLKQLIKKYDKNGKIYYQIFRDENFKKGYVAYLGYYKKNKKNVPVKKCDYDTFSKNIKSTLDKICDKEDPLYIELIDKIEKGGFLLKQIVSTNSVIPHQVHELELDKILENLEKNYPSFKEISDGVSKIDKIKMIFNFRIPYYVGPLNDYHKDKVNSNTWIVKNEGFENENIRPWNFSKIVDEHACEEEFIKRMINECSYIPGEKVLPKSSLLYSEYMVLNELNNLRVNGDKLNPKIKKEIVENIYKKERKVTLKKIRNFLIINNYVDSKVEFSGLSDGIKANMSSYIDFAEILDDNFDNNMVEDLIEQITIHVGNVKLLTEKISNKYPNLEKKQINKIVNLKFKDWARFSRKLLVGIEGTEKETGEINTIIGFLRETNENFMELMSNRYTFSEEISEIKKKYIPNKLSKQIVDDLYVSPAVKKMIWQVLNINDELIKVLGKQPKKIFIEMARGKEEKPEVKDSRKNKLIELYKNLGKEGKEWLNRIEDKTEADFRNRALYLYYTQMGRCMYTGEIIDIERLYDKELYDLDHIIPRKMKKDDSIHKNLVLVTRNSNQYEKKDNYPVPEVIKSRENVRHLWYALKKKGLITEEKYNRLTRINPLSDKELSEFIERQLVETRQTTKVVKDLFENYYTDSKIVTVKAGLVSELRRDFEVLKCREINDLNHAHDAFLNIIVGDVWSKKFTSNPYNFVKKNREKYTLNNIFTKNQKDLRGNEIWNCAEGKKRIIKTLNKPSVLFSVENFEQTGQLFDQNIIGKQDYKEKTSYVPIKGDERLQDISKYGGYRGISGAYFFIVEHTEKNKRVKTIESLPIYMKSYVEENGLLDFCTNEMKLVDPKIIVKKLNYKSEIIVDGFKYLISGKTENRLSLETNEYLYWNHTQTTDIKKILNINEKIELEKYNGDIESERENIIKYIQIILEKFKLKPFIKRRNLPNIEINFADYETEKLLQLLVNLIPLTTKYVSPVDLTVISGSKYAGKVLIPKKISNLNEVIFISKSITGIYESRRRII

SEQ ID NO: 988 - protein, 1023 aa, Helicobacter cinaedi
MKIYSFDIGVASIGWAFIENEVLQDCGIRIFTKAENPKNGASLALPRREARGVRKRLARRRGRLNTIKQLLCKEFGLQLEDYLSNDGELPKAYTASKANPLKSPYELRTLALSQKLDSKDLVRVILHIAKHRGYGNKHAKDSKDTESGKVKKAIEFNRKTLAEKGYRSVGEYLYREFFQQSRISQNNGATEFINVRNKAGNYEHCVAQDMLKEELESILNAQRQFGFSLKQDFENKLLTKIFEQRPLKSFADKVGNCCFIAGEKRTPKDSLSAIEFIALSRTINTLINLSKESGEIYNRAIILQIVESTLKKGEISYKELREIIRLDERLRFKDPRLDYSREIKEAEKVKFLEFKQLKGFKKALGESFTTLARSQLDEIAEHIALIKDRVKLNEKLESYALTKEQREALSNLSFSAHINLSLQALKQILPFMRGDNGEQCLDYDESVEKAGLKALSKDTLKGQMLPPLNEFEPYLSNPVVARALAEYRKVLNALLKQYGSPHKIHIEYAREAKLSSTERQKYEKEQKDNYAANQAAHKKCQELGLEPSSTNLLKLKLWQEQGGLCLYSGAKITISYLQDPTALQVDHIYPYSRSFDDSYMNKCLVLTKANQEKGNRTPFEAFGTDSAKWGVITTLAQKLPHKKRRRILNTAFNDKEAGFKLRNLNDTSYIARLVADYTETYLEFLPLVESENTTLGKGQKGSKKHIAIVNGALTSTMRYYLGFASKDRDNHLHHALDAVIIGFMNDSVIKAFSDFKKTQETSKAAYYAHTLSKQEYKKQRAFIQLPSGENFRASVLEKVESVFVSKPPRKRVRGALHEATFYSPNDPKLLKNYGGTKGVERALALGKMRKVGAKIVSNGAMVRVDIFRHKSSGKFYGVPVYTMDFALGILPNKAVVVGKDKNGVIKDWLEMDSSYEFIFSLYKDDLLLVQKKEMAEPELCYFMSFNSSIAQISVAKHDNNFSTLTKNQKLLFSNATQEDVSGKSIGIQNLQVFEKWQVSVLGEVKRTQSYPRENISLASKAKK

SEQ ID NO: 989 - protein, 1023 aa, Helicobacter cinaedi
MKIYSFDIGVASIGWAFIENEVLQDCGIRIFTKAENPKNGASLALPRREARGVRKRLARRRGRLNTIKQLLCKEFGLQLEDYLSNDGELPKAYTASKANPLKSPYELRTLALSQKLDSKDLVRVILHIAKHRGYGNKHAKDSKDTESGKVKKAIEFNRKTLAEKGYRSVGEYLYREFFQQSRISQNNGATEFINVRNKAGNYEHCVAQDMLKEELESILNAQRQFGFSLKQDFESKLLTKIFEQRPLKSFADKVGNCCFIAGEKRAPKDSPSAIEFIALSRTINTLINLSKESGEIYNRAIILQIVESTLKKGEISYKELREIIRLDERLRFKDPRLDYSREIKEAEKVKFLEFKQLKGFKKALGESFTTLAISQLDEIAEHIALIKDRVKLNEKLESYALTKEQREALSNLSFSAHINLSLQALKQILPFMRGDNGEQCLDYDESVEKAGLKALSKDTLKGQMLPPLNEFEPYLSNPVVARALAEYRKVLNVLLKQYGSPHKIHIEYAREAKLSSTERQKYEKEQKDNYAANQAAHKKCQELGLEPSSTNLLKLKLWQEQGGLCLYSGAKITISYLQDPTALQVDHIYPYSRSFDDSYMNKCLVLTKANQEKGNRTPFEAFGTDSAKWGVITTLAQKLPHKKRRRILNTAFNDKEAGFKLRNLNDTSYIARLVADYTETYLEFLPLVESENTTLSKGQKGSKKHIAIVNGVLTSTMRYYLGFASKDRDNHLHHALDAVIIGFMNDSVIKAFSDFKKTQETSKAAYYAHTLSKQEYKKQRAFIQLPSGENFRVSVLEKVESVFVSKPPRKRVRGALHEATFYSPNDPKLLKNYGGTKGVERALALGKMRKVGAKIVSNGAMVRVDIFRHKSSGKFYGVPVYTMDFALGILPNKAVVVGKDQNGVIKDWLEMDSSYEFIFSLYKDDVILVQKKEMQRPELCYFVSFDTSGASIKVAKHDNNFSTLTENQKLLFSNATKEEVVGKSIGIQNLKVFEKWQVSVLGEVKRTQSYPRENISLASKAKK

SEQ ID NO: 990 - protein, 344 aa, Helicobacter pullorum
MKILGFDIGIASIGWAFVENGELKDCGVRIFTKAENPKTGDSLAMPRREARSVRRRLARRKGRLETLKRLLAKEWDLCYEDYIAADGELPKAFMGKNLTNPYVLRYEALQRLLSKEELVRVVLHIAKHRGYGNKNAKITKSEESKREQGKILSALATNASVIARYRTVGEYFYKEFCEVIKNPQGLNTNENCTQPKVRVLKPIRNKGGEYTNCILQEDLQRELRCIFEHQKGFGFSITQEFQDKILKIAFYQRSLKDFSHLVGKCTFYPDEPRAPKFSLSAIEFITKAKAINLLASIAKESGEVWDKEQWRERLDSVFSAVCERGINTIPSSSHFLNIFDILYL

SEQ ID NO: 991 - protein, 1688 aa, Ignavibacterium album
MEFKKVLGLDIGTNSIGCALLSLPKSIQDYGKGGRLEWLTSRVIPLDADYMKAFIDGKNGLPQVITPAGKRRQKRGSRRLKHRYKLRRSRLIRVFKTLNWLPEDFPLDNPKRIKETISTEGKFSFRISDYVPISDESYREFYREFGYPENEIEQVIEEINFRRKTKGKNKNPMIKLLPEDWVVYYLRKKALIKPTTKEELIRIIYLFNQRRGFKSSRKDLTETAILDYDEFAKRLAEKEKYSAENYETKFVSITKVKEVVELKTDGRKGKKRFKVILEDSRIEPYEIERKEKPDWEGKEYTFLVTQKLEKGKFKQNKPDLPKEEDWALCTTALDNRMGSKHPGEFFFDELLKAFKEKRGYKIRQYPVNRWRYKKELEFIWTKQCQLNPELNNLNINKEILRKLATVLYPSQSKFFGPKIKEFENSDVLHIISEDIIYYQRDLKSQKSLISECRYEKRKGIDGEIYGLKCIPKSSPLYQEFRIWQDIHNIKVIRKESEVNGKKKINIDETQLYINENIKEKLFELFNSKDSLSEKDILELISLNIINSGIKISKKEEETTHRINLFANRKELKGNETKSRYRKVFKKLGFDGEYILNHPSKLNRLWHSDYSNDYADKEKTEKSILSSLGWKNRNGKWEKSKNYDVFNLPLEVAKAIANLPPLKKEYGSYSALAIRKMLVVMRDGKYWQHPDQIAKDQENTSLMLFDKNLIQLTNNQRKVLNKYLLTLAEVQKRSTLIKQKLNEIEHNPYKLELVSDQDLEKQVLKSFLEKKNESDYLKGLKTYQAGYLIYGKHSEKDVPIVNSPDELGEYIRKKLPNNSLRNPIVEQVIRETIFIVRDVWKSFGIIDEIHIELGRELKNNSEERKKTSESQEKNFQEKERARKLLKELLNSSNFEHYDENGNKIFSSFTVNPNPDSPLDIEKFRIWKNQSGLTDEELNKKLKDEKIPTEIEVKKYILWLTQKCRSPYTGKIIPLSKLFDSNVYEIEHIIPRSKMKNDSTNNLVICELGVNKAKGDRLAANFISESNGKCKFGEVEYTLLKYGDYLQYCKDTFKYQKAKYKNLLATEPPEDFIERQINDTRYIGRKLAELLTPVVKDSKNIIFTIGSITSELKITWGLNGVWKDILRPRFKRLESIINKKLIFQDEDDPNKYHFDLSINPQLDKEGLKRLDHRHHALDATIIAATTREHVRYLNSLNAADNDEEKREYFLSLCNHKIRDFKLPWENFTSEVKSKLLSCVVSYKESKPILSDPFNKYLKWEYKNGKWQKVFAIQIKNDRWKAVRRSMFKEPIGTVWIKKIKEVSLKEAIKIQAIWEEVKNDPVRKKKEKYIYDDYAQKVIAKIVQELGLSSSMRKQDDEKLNKFINEAKVSAGVNKNLNTTNKTIYNLEGRFYEKIKVAEYVLYKAKRMPLNKKEYIEKLSLQKMFNDLPNFILEKSILDNYPEILKELESDNKYIIEPHKKNNPVNRLLLEHILEYHNNPKEAFSTEGLEKLNKKAINKIGKPIKYITRLDGDINEEEIFRGAVFETDKGSNVYFVMYENNQTKDREFLKPNPSISVLKAIEHKNKIDFFAPNRLGFSRIILSPGDLVYVPTNDQYVLIKDNSSNETIINWDDNEFISNRIYQVKKFTGNSCYFLKNDIASLILSYSASNGVGEFGSQNISEYSVDDPPIRIKDVCIKIRVDRLGNVRPL

SEQ ID NO: 992 - protein, 1354 aa, Indibacter alkaliphilus
MKKILGLDLGTTSIGWAFIKEPEKDVVGSEIVDMGVRIVPLSSDEENDFAKGNTISINADRTLKRGARRNLQRFKQRRNALLETFKEKNLIPSNFQYAEDGPSSTFSTLKLRDKAAKEKIELDDFVKVLLQINKKRGYKSSRKAMSEEDEGTAIDSMGIAKELYENDLTPGQWVYEALKNGRKNVPDFYRSDLQEEFKKIVNYQSEFYPDILNTSFVEDWMGKASTPTKQYFNKRGVQLAENKGKREERRLQEYKWRAEAVNFKIDLSEIALILSQINSQISNSSGYLGAISDRSKELYFKNLTVGQYLYQQVKKNPHTRLKGQVFYRQDYLDEFEKIWSVQSSFYPQLNDELKQEVRDVTIFFQRRLKSQKHLISNCEFEEHHKVVPKSHPIFQEFRIWQNLNNLTLIKKDNLNEKCELALEDKTALANELAFKKELSVKDALKVLGLKPSDWEFNFTKIEGNRTNHAFFEAFAKIIELEDGEPIDLGNLKADDILDQFSEAFLRIGIDTELLQVNSDIEGAEYEKQSYIQFWHLLYSSEDDQKLKQNLIRKFGFKPEHAKILASISLQDDHASLSSRAIKKILPHLQSGLIYDKACTYAGYNHSSSFTKDENEKRELRAELELLKKNSLRNPVVEKILNQMINVVNAILKDPNLGRPDEIRVEMARELKANAEQRKNMTSNIASATRDHEKYREILKKEFGLKRVTKNDLLRYKLWLETDGISLYTGKPIEASKLFSKEYDIEHIIPKARLFDDSFSNKTICERQLNIDKANVTAFSFLQNKLSADEFEQYQSRVKSLYGKLSKAKIQKLLMANDKIPEDFIARQLQETRYISKKAKEILFEITMRVSVTTGTITDKLREDWGLVEIMKELNWEKYDKLGLTYTIEGKHGERLNKIKDWNKRNDHRHHAMDALTVALTKPAYIQYLNNLNAKAIGNKKGTEIFAIEQKYLKRENGKLCFIPPIENIRAEAKKHLSKILVSYKAKNKVVTINKNKTKKKAGFNEQTALTPRGQLHKETVYGKSFHYSTKFEKIGASFDAQKINTVAKKEEREALLKRLAENGNDPKKAFTGKNSLNKMPIYLDLGKNIKLSEKVKTVVLEQNYTIRKNIDPDLKVDKVIDVGIKRILESRLEEFGGNAKLAFSNLEENPIWLNKEKGIPIKRVKISGVSNVESLHVKKDHFGEKILDEEGNEIPVDFVSTGNNHHVAIYEDEDGNLQDEVVNFYEAVIRRNQGESIIKYRHEEGWNFLYSIKQNEFFVFPSQDFNPNDFDLLDPKNYDLISPNLYRAQKFSKVMYGNSAVRDYVFRHHLETVLNDVKELKDVAYKQLKSLQYLNGIKKVRLNHLGQIIQVGEY

SEQ ID NO: 993 - protein, 1397 aa, Joostella marina
MKKVLGLDLGTNSIGWALVNEATKEEKKEGKSSEIIKLGVRVNPLTVDEKTNFEKGRPLSTNADRTLKRSARRNLQRYKLRRRNLIEILIKNGFITKDTPLTETGKDTTHQTLKLRAKSAKEKVDLKDFAKILLTINKKRGYKSSRKVNSDEDGLAIDGMAVAKHLYEQNLTPGQYVLNLLQKNKKYVPDFYRSDLQEEFKNIWNNQKTYYFDILTDTLFEELKDKNKSQTWAICKKPFDIAGIKQIGKASDKRLERYKWRTEGLTQKLNLEYLAIALQEINNDINKSSGYLGAISDRSKELFFNKETVGENLYRQLVKTPHTSLRNQVFYRQDYLDEFETIWETQAKFYPQLTHTLKEEIRDVIIFYQRKLKSQKSLISFCQFESWEQTYIEKETGKSKTRTVGRKVIPKSSPLFQEFKIWQNLNSLEFRNSDEGEIIEFIKLDEDIRQTVFEELNLRGNLKPNDVLKILGNYISLGKVSQWKCNFEEIEGNRTNAALYNVYQIIAENEGYGFDWAKKTASEINKELKNIFPQLGIDASILDFDFTQANFDKQTSYQLWHLLYSAEEDFKISEEDKVLYGNSSVSLKKKLHQKYGFKPEYTKLLTNISLQPDYGNLSAKAICNILPYLKENNVYSEACDLTGYNHSNFLTAEEQAKRPLKPILELLKKNSLRNPVVEKILNQMVNVVNQVIETYGKPDEIRIELTRELKKSAKERANMTKSIADATRRNDDYRKTIIKEFGIPNPTKSDVVRYRLWQELASRGYKDIFTDTEIKPQELFSNKIDIEHIIPKALLFDDSFSNKTLAFKKDNLKKANRTAYDFIANDYAPNLENYIERVESLHKDRKITRAKRNKLLMLQSKLPDGFIERDLRNSQYITKEAKKMLYEVCRTVVSTSGSITDKLREDWDLINVMKELNFPKYKALGLTEKIERYDIGAEKMKEVEIIEDWNKRNDHRHHAIDALTVAFSTHSHIQYLNHLNARRDEGHKKHAAIIAIESTITEKEGNKKRRFIAPLPNFRLQAKEHIESILVSFKNKNKVVTNNINKTKRIKKDKFNTKVQLTPRGQLHKETIYGKIKQPLEKHIKLNKSFTLEQAKLIIDKRQREKVLNHLEKYAHNSDIAFNSKTLKKNPLLISDEPLKEVLCFEEVFTIRKDISYDNFKNEKQLDKVIDEKVKQALKERINQYNGDFREAFSDIERNPIWLNKAKGICVKRATIKGVSNAEPLHTAKNHLGEEVLTENKEQIPVDYVSTGNNHHVAIYEDEDGNLQEKVVSFYEAVIRVNEGLPIIDKEYNKSLGWTFKFTMKQNEMFVFPSEDFNPTEIDLLDQKNASLISPNLFRVQKFTIKDYFFRHHLETTVENNNTLKNTTWRREGLSGIYGIIKIRLNHLGEIVQVGEY

SEQ ID NO: 994 - protein, 1060 aa, Kingella kingae
MAAKSLNYILGLDLGIASCGWAVVEMDEQENPLRLIDVGVRTFEEAENPKDGSSLAETRRLARAQRRLISRRANRMNKLCRLLKQENVLQANDYDEKGLIIGLPNQAWELRAQGLDRKLEPKEWAAVLIHLVKHRGYLSQRKNESQTADKELGALLSGMNHNHQLLQSQSNQYRTPAELAIKQFATQDGHIRNQRGAYTHTFNRLDLQNELNQLFDAQTRLGNPHVSGSLKTAINDLLMNQKAALSGDAILEMLGRCTFEPSEYKAAKNTYSAERFVWLGKLTNLRIQDNGLESALSREQRELLLNEPYNKTKLTYQQVRKLLRLPETAFFKGLRYGKDNAESATFMEMKSYHAIRKSLENKSLKSEWEKLKTQPKLLDLIGTAFSIYKTDDEIAGCLKNQLPENVIIALQGQLNFSNFMELSLKALEKLLPLMEQGLRYDEACTQIYGNRHEKIADKTEKFLPNIPADKLRNPVVLRTLTQARKVINAIIRRYGSPARVHIETGREVGKSFSDRDKLKKQQEENQEQRRRAIDEWKQFFPNAAHEPKAVDILKLRLYQLQQGKCLYSGLPIDVRRLPEKGYVEIDHALPFSRTWDDSFNNKILVLASENQNKGNQTPYEYLRGADNSESWRLFVENVQNCQFSPNKKQKIMAKQLDEKGFLERNLNDTRYVSRFLCQFISEHLHLTGKGKKRVFASNGQITALLRGRWGLSKNREENDRHHAVDAVVVACSTVAMQQKITQFVRYQKGNVFTGERIDKETGEVISIHFPTPWEHFREEVMIRVFDDNPLRTLPEKLPNRPEALHEYVMPLFVSRMPTRKMTGQGHKETIKSAKRLDEKISVLRVPLTQLKLNDLENMVNREREPALYEALKARLEQFKNDPAKAFAEPFFKQGGQQVKAVRVEIVQKSGMLLRKINGVADNGSMVRVDVFEKSGKFYLVPIYAWQVAEGILPNYAVVAHKDESDWILMDESYHFKFALYKNDLLEVQTKKGGIMGYFASLDRATGAITIREHDRDKKKCKDGEHRSIGVKMASSFKKLQVDELGKNIHETRSRKRPNIG

SEQ ID NO: 995 - protein, 1314 aa, Lactobacillus animalis
MLKKDYSIGLDIGTNSVGHAVVTDDYKVPTKKMKVFGDTSKKTIKKNMLGVLLFNEGQTAADTRLKRGTRRRYTRRKNRLRYLQEIFAPELAKVDPNFLYRLEESSLVAEDKKYDVYPIFGKREEELLYHDTYKTIYHLRSALANNDQPADLRLVYLALAHIIKYRGNFLLEGEIDLRTTDINKVFAEFSETLNENSDENLGKLDVADIFKNNTFSKTKKSEELLKLSGAKKNQLAHQLFKMMVGNMGSFKKVLGTDEEHKLSFGKDTYEDDLNDLLAEAGDQYLDIFVAAKKVYDAAILASILDVKDTQTKTVFSQAMIERYEEHQKDLIELKRVFKKYLPEKCHDFFSEPKISGYAGYIDGKVSEEDFYKYTKKTLKGIPETEEILQKIDANNYLRKQRTFDNGAIPHQVHLKELVAIVENQGKYYPFLRENKDKFEKILNFRIPYYVGPLARGNSKFAWLTRAGEGKITPYNFDEMIDKETSAEDFIKHMTINDLYLPTEPVLPKHSLLYERYTIFNELAGVRYVTENGEAKYFDAQTKRSIFELFKLDRKVSEKMVIKHLKVVMPAIRIQALKGLDNGKFNASYGTYKDLVDMGVAPELLNDEVNSEKWEDIIKTLTIFEGRKLIKRRLENYRDFLGEDILRKLSRKKYTGWGRLSAKLLDGIYDKKTHKTILDCLMTEDYSQNFMQLINDDNYSFKETIKNAQVIEKEETLAKTVQELPGSPAIKKGILQSLEIVDEIIKVMGYKPKSIVVEMARETQKTHGTRKREDRVQQIVENLKDANELPEKLPSNAELSDERKYLYCLQNGRDMYTGAPLDYDHLQFYDVDHIIPQSFLKDDSIENKVLTIKKENVRKTNGLPSEAVIQKMGSFWKKLLDAGAMTNKKYDNLRRNLHGGLNEKLKERFIERQLVETRQITKYVAQLLDQRLNYDGNGVELDEKIAIVTLKAQLASQFRSEFKLRKVRALNNLHHAHDAYLNAIVANLIMAKYPELEPEFVYGKYRKAKFKGLGKATAKNTLYANVLYFLKENEVYPFWDKARDLPTIKRYLYRAQVNKVRKAERQIGGFSDEMLVPKSDSGKLLPRKEGLDPVKYGGYAKAVESYAVLITADEVKKGKTKKVKTLVNIPIIDSKKYEADPTAYLASRGYTNVTNSFILPKYSLLEDPEGRRRYLASFKEFQKANELILPQHLVELLYWVNAKDGEQKLEDHKAEFKELFDKIMEFADKYVVAPKNSEKIRRLYEENQDATPMELGKNFVELLRYTADGAASDFKFFGENIPRKRYNSAGSLLNGTLIYQSKTGLYETRIDLGKL

SEQ ID NO: 996 - protein, 1371 aa, Lactobacillus buchneri
MKVNNYHIGLDIGTSSIGWVAIGKDGKPLRVKGKTAIGARLFQEGNPAADRRMFRTTRRRLSRRKWRLKLLEEIFDPYITPVDSTFFARLKQSNLSPKDSRKEFKGSMLFPDLTDMQYHKNYPTIYHLRHALMTQDKKFDIRMVYLAIHHIVKYRGNFLNSTPVDSFKASKVDFVDQFKKLNELYAAINPEESFKINLANSEDIGHQFLDPSIRKFDKKKQIPKIVPVMMNDKVTDRLNGKIASEIIHAILGYKAKLDVVLQCTPVDSKPWALKFDDEDIDAKLEKILPEMDENQQSIVAILQNLYSQVTLNQIVPNGMSLSESMIEKYNDHHDHLKLYKKLIDQLADPKKKAVLKKAYSQYVGDDGKVIEQAEFWSSVKKNLDDSELSKQIMDLIDAEKFMPKQRTSQNGVIPHQLHQRELDEIIEHQSKYYPWLVEINPNKHDLHLAKYKIEQLVAFRVPYYVGPMITPKDQAESAETVFSWMERKGTETGQITPWNFDEKVDRKASANRFIKRMTTKDTYLIGEDVLPDESLLYEKFKVLNELNMVRVNGKLLKVADKQAIFQDLFENYKHVSVKKLQNYIKAKTGLPSDPEISGLSDPEHFNNSLGTYNDFKKLFGSKVDEPDLQDDFEKIVEWSTVFEDKKILREKLNEITWLSDQQKDVLESSRYQGWGRLSKKLLTGIVNDQGERIIDKLWNTNKNFMQIQSDDDFAKRIHEANADQMQAVDVEDVLADAYTSPQNKKAIRQVVKVVDDIQKAMGGVAPKYISIEFTRSEDRNPRRTISRQRQLENTLKDTAKSLAKSINPELLSELDNAAKSKKGLTDRLYLYFTQLGKDIYTGEPINIDELNKYDIDHILPQAFIKDNSLDNRVLVLTAVNNGKSDNVPLRMFGAKMGHFWKQLAEAGLISKRKLKNLQTDPDTISKYAMHGFIRRQLVETSQVIKLVANILGDKYRNDDTKIIEITARMNHQMRDEFGFIKNREINDYHHAFDAYLTAFLGRYLYHRYIKLRPYFVYGDFKKFREDKVTMRNFNFLHDLTDDTQEKIADAETGEVIWDRENSIQQLKDVYHYKFMLISHEVYTLRGAMFNQTVYPASDAGKRKLIPVKADRPVNVYGGYSGSADAYMAIVRIHNKKGDKYRVVGVPMRALDRLDAAKNVSDADFDRALKDVLAPQLTKTKKSRKTGEITQVIEDFEIVLGKVMYRQLMIDGDKKFMLGSSTYQYNAKQLVLSDQSVKTLASKGRLDPLQESMDYNNVYTEILDKVNQYFSLYDMNKFRHKLNLGFSKFISFPNHNVLDGNTKVSSGKREILQEILNGLHANPTFGNLKDVGITTPFGQLQQPNGILLSDETKIRYQSPTGLFERTVSLKDL

SEQ ID NO: 997 - protein, 315 aa, Lactobacillus casei
MFKDYLKQLEDDGTAKAIRQLYDRYIDGDDAKPFVREDFVKALTKEVTAHPNAKSPELLERLAQPDFMLKQRNKANGAIPVQMQQRELDQIIKNQSVYYDWLAAPNPVEKHRKSMPYQLDELLNFRIPYYVGPLVTAKEQKAARGGVFAWMVRKDPDGNITPYNFDEKVDREASANTFIQRMKTTDTYLIGEDVLPKQSLLYQSYEVLNELNNVRVNDNKLSFDQKQQVLGELFERHNTVTIKQFVDNLLAHGDYDRIPEVRGLADEKRFLSSLSTYNQLKGILHEAIDDSDKQTDMVDCKINPNAVRTKKISFL

SEQ ID NO: 998 - protein, 236 aa, Lactobacillus casei
MFKDYLKQLEDDGTAKAIRQLYDRYIDGDDAKPFVREDFVKALTKEVTAHPNAKSPELLERLAQPDFMLKQRNKANGAIPVQMQQRELDQIIKNQSVYYDWLAAPNPVEKHRKSMPYQLDELLNFRIPYYVGPLVTAKEQKAARGGVFAWMVRKDPDGNITPYNFDEKVDREASANTFIQRMKTTDTYLIGEDVLPKQSLLYQSYEVLNELNNVRVNDNKLSSSIFKSSATMITNS

SEQ ID NO: 999 - protein, 1389 aa, Lactobacillus casei
MIIRTYELKTITTIAILKMFQLLTGGLSMTKLGKPYGIGVDIGSNSIGFAAVDENSHLIRLKGKTVIGARLFEEGKAAADRRASRTTRRRLSRNRWRLSFLRDFFESHITPTGPNFFMRQKYSEISPKDKARYKYEKRLFNDRTDAEFYQQYPTMYHLRNRLLTDPSKADVREIYFAIHHILKSRGHFLTSGYAKDFNTNKVALNEIFPALQDAYAQVYPDLDITFDENKVNEFKTVLLNEKATPSDTQRALVNLLLAEDGDKDILKQQKQVLTEFAKAVVGLKTKLNVALGTEVDSSEATVWNFSLGQLDDKWAGIESAMTDEGTEILDQIRDLYRARLLNGIVPAGKTLSQAKVDDYAQHHEDLELFKDYLKQLEDDGTAKAIRQLYDRYIDGDDAKPFVREDFVKALTKEVTAHPNAKSPELLERLAQPDFMLKQRNKANGAIPVQMQQRELDQIIKNQSVYYDWLAAPNPVEKHRKSMPYQLDELLNFRIPYYVGPLVTAKEQKAAQGGVFAWMVRKDPDGNITPYNFDEKVDREASANTFIQRMKTTDTYLIGEDVLPKQSLLYQRYEVLNELNNVRVNNEKLSIEQKQQVIRELFERHNSVTIKQFAENLRAHGDYAHIPEIRGLADEKRFLSSLSTYRQLKSLLPDAIDDPAKQADIENIIAWSTVFEDAAIFKTKLKEINWLDSQTITKLSNIRYRGWGQFSHKFLNGLTLGNGHTIIQELFLSNNNLMQILTDETLQKKMTELNADKLKAANINDAIDDAYTSPSNKKALRQVLRVIEDIKRAADGQDPSWLYVETADGGGTPGKRTRARQHQLQEIYANAAHELIDSAVRGELEDKIADKADFNDRLVLYFMQGGRDIYTGTPLNIDQLSSYDIDHILPQSLIKDNSLDNRVLVHAIINREKNATFASTIYAQKMNATWRQWHEAGLISGRKLRNLQMRPDQIDKYASGFVARQLVETRQIIKLTEQIVAAQYPETKIIAVKAGLSHQLREELEFPKNRDVNHYHHAFDAFLAARIGTYLLKRFPNLQAFFTYGKFKKADVKKLRGFNFIRDITHAEDKIVVKDTGEVIWDKKRDVDELDRIYNFKRMLITHEVHFEKADLFKQTVYGAKDSKEAGGKKQLISKKKGYPVDIYGGYTQETGSYLSVVRLTKKAMYAVVKVSTRDAAKLAVAKSISEQKENETLNDIIDEKLSKISKNGKITHELFEVVLPRVGQKTLFKNSKYNLFLVNSDTYMHNYQELWMPREYQKMWKDISLSKYGDAQTEDQLDQIFGFIVSQVNSYFNLYDINQFRKKLNDAADKFATLPMRDTDDMQGKIATIGQLLIGLQANAARSDLRNLDIKTPLGLLQIPNGISLDSDTSVVYQSPTGLLEREVHLSDL

SEQ ID NO: 1000 - protein, 412 aa, Lactobacillus casei
MIKDNSLDNRVLVHPLVNREKDTIFASTRFAKQTNGMWRQWHAAGLISSRKLRNLQMRPDEIDKYASGFVARQLVETRQIIKLTEQIVADQYPDTKIIAVKAGLSSQLRKELDFPKNREVNHYHHAFDAFLAARIGTYLLKRYPNLEPFFTYGKFKKTEVKKLKSFNFIRDMTHAKDKIVAKETGEIVWDNASDINELDRIYNFKRMLITHEVRFETASLFKQTLYAAKNPKNRGGSRQLIPKKKGYLVDIYGGYTQETGSYLSVVRLTKKAMYAVVKVSTRDAAKLAVAKSISEQKENETLKKIIDGKLSKTSKKGKTTHQLFEIVLPRVGQKTLFKNSKYNQFLVNSDTYMHNYQELWMPREYQRMWKDILLSNHGDAQIEGQLDQIFKFIVSQVNSYFNLYDINQFRKK

SEQ ID NO: 1001 - protein, 234 aa, Lactobacillus casei
MKVTKKTETIFKVVKIATSQVAALNKARSRSTAEELSVLTELLKPKFSKVGKNGKITDTPFEVVLPRVPREQLFYNAKYGFFMVNSDTMFHNFQEIWVSRSDQKILQQIRKAKIDYPNVDQDLDNLFHNLADQIVKYFDLYSIAGFKEKISQSQNTFNDLAVDDTDQSVGKITVINELLKGAQANGMTGSLKVLKISTPFGFTQDKSGVLTKDSSIIYQSPTGLFERSVRLTDL

SEQ ID NO: 1002 - protein, 566 aa, Lactobacillus casei
MQILTDEVLKQKIAELNAHELKASGIYAAIDDAYTSPSNKKALRQVLSVIDDITNAAGQAPNWLYIETADGDGVPGKRTNSRQRKIQEIYVNAAQELITSSVRGELEDKIASRADFTDRLVLYFMQGGRDIYTGEPLNIDNLSSYDIDHILPQSLIKDNSLDNRVLVHPLVNREKDTIFASTRFAKQMNGMWRQWHAAGLISSRKLRNLQMRPDEIDKYASGFVARQLVETRQIIKLTEQIVADQYPDAKIIAVKAGLSSQLRKELDFPKNREVNHYHHAFDAFLAARIGTYLLKRYPNLEPFFTYGKFKKTEVKKLKSFNFIRDMTHAKDKIVAKETGEIVWDNASDINELDRIYNFKRMLITHEVRFETASLFKQTLYAAKNSKNRGGSRQLIPKKKGYLVDIYGGYTQETGSYLSVVRLTKKAMYAVVKVSTRDAAKLAVAKSISEQKENETLKKIIDGKLSKTSKKGKTTHQLFEIVLPRVGQKTLFKNSKYNQFLVNSDTYMHNYQELWMPREYQRMWKDILLSNHGDAQLEGQLDQIFKFIVSQVNSYFNLYDINQFRKK

SEQ ID NO: 1003 - protein, 1363 aa, Lactobacillus casei
MTKLGKPYGIGVDIGSNSIGFAAVDENSHLIRLKGKTVIGARLFEEGKAAADRRASRTTRRRLSRNRWRLSFLRDFFESHITPTDPNFFMRQKYSEISPKDKARYKYEKRLFNDRTDAEFYQQYPTMYHLRNRLLTDPSKADVREIYFAIHHILKSRGHFLTSGYAKDFNTNKVALNEIFPALQDAYAQVYPDLDITFDENKVNEFKTVLLDEKATPSDTQRALVNLLLAEDGDKDILKQQKQVLTEFAKAVVGLKMKLNVALGTEVDSSEATAWNFSLGQLDDKWAGIESAMTDEGTEILDQIRDLYRARLLNGIVPAGKTLSQAKVDDYEQHHEDLELFKDYLKQLEDDGMAKVIRQLYDRYIDGDDAKPFVREDFVKALTKEVTAHPNAKSPELLERLVQPDFMLKQRNKANGAIPVQMQQRELDQIIKNQSVYYDWLAAPNPVEKHRQSMPYQLDELLNFRIPYYVGPLVTAKEQKAAQGGVFAWMVRKDPDGNITPYNFDEKVDREASANTFIQRMKTTDTYLIGEDVLPKQSLLYQSYEVLNELNNVRVNDNKLSFDQKQQVLGELFERHNTVTIKQFVDNLLAHGDYDRIPEVRGLADEKRFLSSLSTYNQLKGILHEAIDDSDKQTDIEKIIAWSTIFEDKAIFKTKLNEISWLTAGMINSLANIRYRGWGQFSHKLLNELTLSTGRTVFEELLISSHNLMQILTDEVLKQKIAELNAHELKASGIYAAIDDAYTSPSNKKALRQVLSVIDDITNAAGQAPNWLYIETADGDGVPGKRTNSRQRKIQEIYANAAQELITGSVRGELEDKIASRADFTDRLVLYFMQGGRDIYTGEPLNIDNLSSYDIDHILPQSLIKDNSLDNRVLVHPLVNREKDTIFASTRFAKQMNGMWRQWHAAGLISSRKLRNLQMRPDEIDKYASGFVARQLVETRQIIKLTEQIVADQYPDAKIIAVKAGLSSQLRKELDFPKNREVNHYHHAFDAFLAARIGTYLLKRYPNLEPFFTYGKFKKTEVKKLKSLKSFNFIRDMTHAKDKIVAKETGEIVWDNASDINELDRIYNFKRMLITHEVRFETASLFKQTLYAAKNSKNRGGSRQLIPKKKGYLVDIYGGYTQETGSYLSVVRLTKKAMYAVVKVSTRDAAKLAVAKSISEQKENETLKKIIDGKLSKTSKKGKTTHQLFEIVLPRVGQKTLFKNSKYNQFLVNSDTYMHNYQELWMPREYQRMWKDILLSNHGDAQLEGQLDQIFKFIVSQVNSYFNLYDINQFRKKIADATDKFAKLPTHDTDNARGKIATIGQLLIGLQANAMRSDLRNLDIKTPFGLLQIGTGITLDLDTSIIYQSPTGLFEREVPLTDL

SEQ ID NO: 1004 - protein, 1360 aa, Lactobacillus casei
MTKLGKPYGIGVDIGSNSIGFAAVDENSHLIRLKGKTVIGARLFEEGKAAADRRASRTTRRRLSRNRWRLSFLRDFFESHITPTDPNFFMRQKYSEISPKDKARYKYEKRLFNDRTDAEFYQQYPTMYHLRTRLLTDPSKADVREIYFAIHHILKSRGHFLTPGYAKDFNTNKVALNEIFPALQDAYAQVYPDLDITFDENKVNEFKTVLLNEKATPSDTQRALVNLLLAEDGDKDILKQQKQVLTEFAKAVVGLKTKLNVALGTEVDSSEATVWNFSLGQLDDKWAGIESAMTDEGTEILDQIRDLYRARLLNGIVPAGKTLSQAKVDDYAQHHEDLELFKDYLKQLEDDGTAKAIRQLYDRYIDGDDAKPFVREDFVKALTKEVTAHPNAKSPELLERLAQPDFMLKQRNKANGAIPVQMQQRELDQIIKNQSVYYDWLAAPNPVEKHRKSMPYQLDELLNFRIPYYVGPLVTAKEQKAAQGGVFAWMVRKDPDGNITPYNFDEKVDREASANTFIQRMKTTDTYLIGEDVLPKQSLLYQSYEVLNELNNVRVNDNKLSFDQKQQVLGELFERHNTVTIKQFVDNLLAHGDYDRIPEVRGLADEKRFLSSLSTYNQLKGILHEAIDDADKQTDIENIIAWSTIFEDKAIFKTKLNEISWLNAGMINSLANIRYRGWGQFSHKLLNELTLSTGRTVFEELLISSRNLMQILTDEVLKQKIAELNAHELKASGIYAAIDDAYTSPSNKKALRQVLSVIDDITNAAGQAPNWLYIETADGDGVPGKRTNSRQRKIQEIYANAAQELITGSVRGELEDKIASRADFTDRLVLYFMQGGRDIYTGEPLNIDNLSSYDIDHILPQSLIKDNSLDNRVLVHPLVNREKDTIFASTRFAKQMNGMWRQWHAAGLISSRKLRNLQMRPDEIDKYASGFVARQLVETRQIIKLTEQIVADQYPDTKIIAVKAGLSSQLRKELDFPKNREVNHYHHAFDAFLAARIGTYLLKRYPNLEPFFTYGKFKKTEVKKLKSFNFIRDMTHAKDKIVAKETGEIVWDNASDINELDRIYNFKRMLITHEVRFETASLFKQTLYAAKNSKNRGGSRQLIPKKKGYLVDIYGGYTQETGSYLSVVRLTKKAMYAVVKVSTRDAAKLAVAKSISEQKENETLKKIIDGKLSKTSKKGKTTHQLFEIVLPRVGQKTLFKNSKYNQFLVNSDTYMHNYQELWMPREYQRMWKDILLSNHGDAQLEGQLDQIFKFIVSQVNSYFNLYDINQFRKKIADATDKFAKLPTHDTDNARGKIATIGQLLIGLQANAMRSDLRNLDIKTPFGLLQIGTGITLDLDTSIIYQSPTGLFEREVPLTDL

SEQ ID NO: 1005 - protein, 700 aa, Lactobacillus casei
MTKLGKPYGIGVDIGSNSIGFAAVDENSHLIRLKGKTVIGARLFEEGKAAADRRASRTTRRRLSRNRWRLSFLRDFFESHITPTDPNFFMRQKYSEISPKDKARYKYEKRLFNDRTDAEFYQQYPTMYHLRTRLLTDPSKADVREIYFAIHHILKSRGHFLTSGYAKDFNTNKVALNEIFPALQDAYAQVYPDLDITFDENKVNEFKTVLLDEKATPSDTQRALVNLLLAEDGDKDILKQQKQVLTEFAKAVVGLKTKLNVALGTEVDSSEATAWNFSLGQLDDKWAGIESAMTDEGTEILDQIRDLYRARLLNGIVPAGKTLSQAKVDDYEQHHEDLELFKDYLKQLEDDGMAKAIRQLYDRYIDGDDAKPFVREDFVKALTKEVTAHPNAKSPELLERLVQPDFMLKQRNKANGAIPVQMQQRELDQIIKNQSVYYDWLAAPNPVEKHRQSMPYQLDELLNFRIPYYVGPLVTAKEQKAAQGGVFAWMVRKDPDGNITPYNFDEKVDREASANTFIQRMKTTDTYLIGEDVLPKQSLLYQSYEVLNELNNVRVNDNKLSFDQKQQVLGELFERHNTVTIKQFVDNLLAHGDYDRIPEVRGLADEKRFLSSLSTYNQLKGILHEAIDDSDKQTDIEKIIAWSTIFEDKAIFKTKLNEISWLNAGMINSLANIRYRGWGQFSHKLLNELTLSTGRTVFEA

SEQ ID NO: 1006 - protein, 330 aa, Lactobacillus casei
MTKLGKPYGIGVDIGSNSIGFAAVDENSHLIRLKGKTVIGARLFEEGKAAADRRASRTTRRRLSRNRWRLSFLRDFFESHITPTDPNFFMRQKYSEISPKDKNRYKYEKRLFNDRTDAEFYQQYPTMYHLRNRLLTDPSKADVREIYFAIHHILKSRGHFLTPGDAKDFNTNKVALNEIFPALQDAYAQVYPDLDITFDENKMNEFKTVLLNEKATPSDTQRALVNLLLAEDGDKDILKQQKQVLTEFAKAVVGLKTKLNVALGTEVDSSEATAWNFSLGQLDDKWAGIESAMTDEGTEILDQIRDLYRARLLNGIVPAGKTLSQAKVDD

SEQ ID NO: 1007 - protein, 330 aa, Lactobacillus casei
MTKLGKPYGIGVDIGSNSIGFAAVDENSHLIRLKGKTVIGARLFEEGKAAADRRASRTTRRRLSRNRWRLSFLRDFFESHITPTDPNFFMRQKYSEISPKDKNRYKYEKRLFNDRTDAEFYQQYPTMYHLRNRLLTDPSKADVREIYFAIHHILKSRGHFLTPGDAKDFNTNKVALNEIFPALQDAYAQVYPDLDITFDENKMNEFKTVLLNEKATPSDTQRALVNLLLAEDGDKDILKQQKQVLTEFAKAVVGLKTKLNVALGTEVDSSEATAWNFSLGQLDDKWAGIESAMTDEGTEILDQIRDLYRARLLNGIVPAGKTLSHAKVDD

SEQ ID NO: 1008 - protein, 1361 aa, Lactobacillus casei
MTKLGKPYGIGVDIGSNSIGFAAVDENSHLIRLKGKTVIGARLFEEGKAAADRRASRTTRRRLSRNRWRLSFLRDFFESHITPTGPNFFMRQKYSEISPKDKARYKYEKRLFNDRTDAEFYQQYPTMYHLRNRLLTDPSKADVREIYFAIHHILKSRGHFLTSGYAKDFNTNKVALNEIFPALQDAYAQVYPDLDITFDENKVNEFKTVLLNEKATPSDTQRALVNLLLAEDGDKDILKQQKQVLTEFAKAVVGLKTKLNVALGTEVDSSEATVWNFSLGQLDDKWAGIESAMTDEGTEILDQIRDLYRARLLNGIVPAGNTLSQAKVDDYAQHHEDLELFKDYLKQLEDDGTAKAIRQLYDRYIDGDDAKPFVREDFVKALTKEVTAHPNAKSPELLERLAQPDFMLKQRNKANGAIPVQMQQRELDQIIKNQSVYYDWLAAPNPVEKHRKSMPYQLDELLNFRIPYYVGPLVTAKEQKAAQGGVFAWMVRKDPDGNITPYNFDEKVDREASANTFIQRMKTTDTYLIGEDVLPKQSLLYQRYEVLNELNNVRVNNEKLSIEQKQQVIRELFERHNSVTIKQFAENLRAHGDYAHIPEIRGLADEKRFLSSLSTYRQLKSLLPDAIDDPAKQADIENIIAWSTVFEDAAIFKTKLKEINWLDSQTITKLSNIRYRGWGQFSHKFLNGLTLGNGHTIIQELFLSNNNLMQILTDETLQKKMTELNADKLKAANINDAIDDAYTSPSNKKALRQVLRVIEDIKRAADGQDPSWLYVETADGGGTPGKRTRARQHQLQEIYANAAHELIDSAVRGELEDKIADKADFNDRLVLYFMQGGRDIYTGTPLNIDQLSSYDIDHILPQSLIKDNSLDNRVLVHAIINREKNATFASTIYAQKMNATWRQWHEAGLISGRKLRNLQMRPDQIDKYASGFVARQLVETRQIIKLTEQIVAAQYPETKIIAVKAGLSHQLREELEFPKNRDVNHYHHAFDAFLAARIGTYLLKRFPNLQAFFTYGKFKKADVKKLRGFNFIRDITHAEDKIVVKDTGEVIWDKKRDVDELDRIYNFKRMLITHEVHFEKADLFKQTVYGAKDSKEAGGKKQLISKKKGYPVDIYGGYTQETGSYLSVVRLTKKAMYAVVKVSTRDAAKLAVAKSISEQKENETLNDIIDEKLSKISKNGKITHELFEVVLPRVGQKTLFKNSKYNLFLVNSDTYMHNYQELWMPREYQKMWKDISLSKYGDAQTEDQLDQIFGFIVSQVNSYFNLYDINQFRKKLNDAADKFATLPMRDTDDMQGKIATIGQLLIGLQANAARSDLRNLDIKTPLGLLQIPNGISLDSDTSVVYQSPTGLLEREVHLSDL

SEQ ID NO: 1009 - protein, 1128 aa, Lactobacillus casei
MTKLGKPYGIGVDIGSNSIGFAAVDENSHLIRLKGKTVIGARLFEEGKAAAKRRAGRTTRRRLSRNRWRLSFLRDFFESHITPTDPNFFMRQKYSEISPKDKARYKYEKRLFNDRTDAEFYQQYSTMYHLRNRLMTDPSRADVREIYFAIHHILKSRGHFLTPGDAKDFNTNDVALDEIFPALQDAYAQVYPDLGITFDEDKANEFKTILLNEIATSIDTQRALVKLLLAEEDDKDILKQQKQVLTEFAKAVVGLKTKLNLALGTEVDSSEATAWNFSLGQLDDKWAGIESAMTDEGTEILDQIRDLYRARLLNGIVPTGKTLSQAKVDDYTQHHEDLQLFKAYLKQLEDDGTAKAIRQLYDRYIDGDDAAPFLRENFVKALTKDVTAHPNTKSPELLERLAQPDFMLKQRNKANGAIPVQMQQRELDQIIKNQAVYYDWLAAPNPVEKHRKSMPYQLDELLNFRIPYYVGPLVTAKEQKAAQGGVFAWMVRKDPEGNITPYNFDEKVDREASANTFIQRMKTTDTYLIGEDVLPKQSLLYQRYEVLNELNNVRVNNEKLSIEQKQQVIRELFERHNSVTIKQFAENLRAHGDYAHIPEIRGLADEKRFLSSLSTYRQLKSLLPEAIDDPAKQADIENIIAWSTVFEDAAIFKTKLKEISWLGSEAITKLSNIRYRGWGQFSRKFLNGLTLGNGHTIIQELLLSTNNLMQILTDETLQKKMTELNADKLKTANINDAIDNAYTSPSNKKALRQVLRVVDDIKRAADGQDPSWLYVETADGGGTPGKRTRARQHQLQEIYANAAHELIDTAVRGELEDKISDKADFNDRLVLYFMQGGRDIYTGAPLNIDQLSSYDIDHILPQSLIKDNSLDNRVLVHAIINREKNATFASTIYAQKMNATWRQWHEAGLISGRKLRNLQMRPDQIDKYASGFVARQLVETRQIIKLTEQIVAAQYPDTKIIAVKAGLSHQLREELEFPKNRDVNHYHHAFDAFLAARIGTYLLKRFPNLQAFFTYGKFTKADVKKLRGFNFIRDITHAEDKIVAKDTGEVVWDKQRDVDELDRIYNFKRMLITHEVRFETADLFKQTVYGARDSKEAGGSKQLIPKKKDIQLIFMGAISERTRPILPL

SEQ ID NO: 1010 - protein, 1366 aa, Lactobacillus casei
MTKLGKPYGIGVDIGSNSIGFAAVDENSHLIRLKGKTVIGARLFEEGKAAAYRRASRTTRRRLSRNRWRLSFLRDFFESHITPTDPNFFMRQKYSEISPKDKARYKYEKRLFNDRTDAEFYQQYPTMYHLRTRLLTDPSKADVREIYFAIHHILKSRGHFLTPGYAKDFNTNKVALNEIFPALQDAYAQVYPDLDITFDENKVNEFKTVLLNEKATPSDTQRALVNLLLAKEGDRDILKQQKQVLTEFAKAVVGLKTKLNVALGTEVDSSEATAWNFSLGQLDDKWAGIESAMTDEGTEILDQIRDLYRARLLNGIVPAGKTLSQAKVDDYAQHHEDLELFKDYLKQLEDDGTAKAIRQLYDRYIDGDDAKPFVREDFVKALTKEVTAHPNAKSPELLERLAQPDFMLKQRNKANGAIPVQMQQRELDQIIKNQAVYYDWLAAPNPVEKHRQSMTYQLDELLNFRIPYYVGPLVTAKEQKAAQGGVFAWMVRKDPDGNITPYNFDEKVDREASANTFIQRMKTTDTYLIGEDVLPKQSLLYQSYEVLNELNNVRVNDNKLSFDQKQQVLGELFERHNTVTIKQFVDNLLAHGDYDRIPEVRGLADEKRFLSSLSTYNQLKGILHEAIDDADKQTDIENIIAWSTIFEDKAIFKTKLNEISWLNAGMINSLANIRYRGWGQFSHKLLNELTLSTGRTVFEELLISSRNLMQILTDEVLKQKIAELNAHELKASGIYAAIDDAYTSPSNKKALRQVLSVIDDITNAAGQAPNWLYIETADGDGVPGKRTNSRQRKIQEIYANAAQELITGSVRGEFEDKIASRADFTDRLVLYFMQGGRDIYTGEPLNIDNLSSYDIDHILPQSLIKDNSLDNRVLVHPLVNREKDTIFASTRFAKQMNGMWRQWHAAGLISSRKLRNLQMRPDEIDKYASGFVARQLVETRQIIKLTEQIVADQYPDTKIIAVKAGLSSQLRKELDFPKNREVNHYHHAFDAFLAARIGTYLLKRYPNLEPFFTYGKFKKTEVKKLKSLKSLKSFNFIRDMTHAKDKIVAKETGEIVWDNASDINELDRIYNFKRMLITHEVRFETASLFKQTLYAAKNSKNRGGSRQLIPKKKGYLVDIYGGYTQETGSYLSVVRLTKKAMYAVVKVSTRDAAKLAVAKSISEQKENETLKKIIDGKLSKTSKKGKTTHQLFEIVLPRVGQKTLFKNSKYNQFLVNSDTYMHNYQELWMPREYQRMWKDILLSNHGDAQIEGQLDQIFKFIVSQVNSYFNLYDINQFRKKIADATDKFAKLPTHDTDNARGKIATIGQLLIGLQANAMRSDLRNLDIKTPFGLLQIGTGITLDLDTSIIYQSPTGLFEREVPLTDL

SEQ ID NO: 1011 - protein, 1354 aa, Lactobacillus coryniformis
MTLHYNVGLDIGTNSVGYTIVDDNGKILQVKGKNGYGVRVFKEGATAAERRIFRTTHRRLKRRKWRLRLLQDFFEPYILPQDDGFFIRRKESNLVLNDRDEDTASLFNDRSDRDFYQAYPTIYHLRQALMTEKRQFDVREIYLAMHHIIKYRGHFLLNGTVNNFTNNKIDLHSDFEELNALLLNVIPELKFQIDLDHSTMFQTTLLNTTISRSGRQRDLVKSFYNGSDDKQLAKQQKSVATELLKAILGLKAKFHKLFNLDLLETTEWEFSFDAEDIDDKLAKLEPLMTENQQQVMDILQRIFAAITLNGIVPEGKTLSASKVDSYQKHKQDLKLLKAIAQHSDKKTATVLQTAYNEYINGIASKPLKQEDFYKRLTNAVKKSSDPQVADMLALIDQEKFLPKQRTKENGAIPHQLHQLELERIIDNQKDYYPWLAELNPNQARQKVAKYKLSELVAFRVPYYVGPLIEPEVQQATSNAHFAWMARKEAGPITPWNFDQKVDRNVSAERFIKRMTTKDTYLLAEDVLPLHSLLYQRFIVLNELNNVRVNGQKLTKKQKQAVYQDLFKRQPHVTKKQFKSYLVQTGEFAESSKIEGLANETSFNSGLTTENELRKIFGAQLDEARYQVDFEQIIEWATLFEDAKILRTKLAEITWLTTEQIEKLAGIRYRGWGRFSRKLLAGLRDQNGQQIIDLLWDTPNNFMVIVSQAAFSEAITKENEKLIDRRGAQDVITDLYTSPQNKKALRQVLAIVADVQKAMGGVPPQRIFIEFAREDEKNPRRSVERSRQLEKLYQTISNEFLINSEVRQELKEAVDQKVNFKDRLFLYFLQGGVDLYSGKRINIDQLSHYDIDHILPQSFIKDDSLDNRVLVSQKLNRSKSDSVPLSEFANYKFGPAMQAKWLQLKEAGLLSKRKYDNLTLDPTKLSKFAPLGFVNRQLVETRQVIKLAANLLASEETKVVTIKANMTHQVRKELDFPKNRNVNNYHHAFDAYLTAFVGIFLSKRYPKLKPYFTYGDFQKGNKLPDLKNFNFLYELKNKDRSIDSNTGEIIWDKQRDLAYMNKIYNFKKVTVVHEVLTKSGALYNQTLYKASEDKASGRGTKQLIRKKDNMPTELYGGYTGSTSAFMSIVRLWKKDKPYYKVVGIPTRMAAKLANQAQLLDYLTKKFTTRKLVKKTGDYKTTVERFELVVPKVGFNQLVIDGGQPFMLGSATYQYNARELFISKEAVKALNKQLSTHVDLVQVFDEILVQVNRWFPLYDTNGFREKLSHGRDRFMKLNDSFEEKSDTQIDVLNRILIGFHANAARTNLKILGLGTDLGFMTQQAGIRLTEKAILVHQSPSGLFERKVALRDLKGLR

SEQ ID NO: 1012 - protein, 544 aa, Lactobacillus crispatus
KYYLYFMQLGRDAYTGKPINIDEVSQYYDIDHILPQSFIKDDSLNNRVLVAKPINNGKSDGVPLKLFGDNLATGLGITVKQMWNNWADKGLINKAKQNNLFLDPENINKHQASGFIRKQLVETSQIIKLATTILQAEYPKTKIIVVKASSNHYLRNEFDLYKSREVNDYHHAIDAYLTTICGNLLYQAYPKLRPFFVYGQFKKFSSDPKKENEILKKTKNFDFVAKLLGSKAPNEIRSQQGKVLFEKNKIRLQLNKAYNYKYMLVSRDTTTKNQEMFGMTIYPRAERDIAKSRKLIEKRKGFSTDIYGGYTGTAAAYMAIVRINKTKSSQYKVIAVPMTKRAILNKAEKEGNYEKILKQILSPSILYNDKGKRKAGVISFDIIKGKVPYNQVVQDGNKKFLLKSAIYLCNAKQLVLSEEAMRVITGHWLDSDKQDQELLDVYDEILEKIDRYLPLFDIRDFRNKLHKGREKFLKLNAEDKFKAIIQILKGLHDNSDTGELKDIGITVPFGQLQNNSGITLSSDTILVYQSPTGLFEKRVKISSL

SEQ ID NO: 1013 - protein, 298 aa, Lactobacillus crispatus
MDELNKISVNGKKLSVSVKQELYEDLFKKNNTVSAKQLKNWLIENQKLPYIKIKGLADQTKFNSSLSTYIKLKKSGLFVDKLDSNEFRDDFEKIIEWSTIFEDKQIYIQKLQTIDWLTAKQIQFLQNIRLQGWGRLSKKLLTAIVDSNGQNIIEQLWNSQQIFMSIVNKADIKGTITDANQDLMHSNSMEDILSEAYTSPANKKMIRQVVKVVHDIQKAASGQAPKQIAIEFARESRRNSKLSQTRGHKLQDIYQKISGDIVNKNLKDKLAEYIKNNQLSVWEKTSFQMNKNDQDFLF

SEQ ID NO: 1014 - protein, 279 aa, Lactobacillus crispatus
MNGKKLSVSVKQELYEDLFKKNNTVSAKQLKNWLIENQKLPYIKIKGLADQTKFNSSLSTYIKLKKSGLFVDKLDSNEFRDDFEKIIEWSTIFEDKQIYIQKLQTIDWLTAKQIQFLQNIRLQGWGRLSKKLLTAIVDSNGQNIIEQLWNSQQIFMSIVNKADIKGTITDANQDLMHSNSMEDILSEAYTSPANKKMIRQVVKVVHDIQKAASGQAPKQIAIEFARESRRNSKLSQTRGHKLQDIYQKISGDIVNKNLKDKLAEYIKNNQLNKDKYYTR

SEQ ID NO: 1015 - protein, 538 aa, Lactobacillus crispatus
MQLGRDAYTGKPINIDEVSQYYDIDHILPQSFIKDDSLNNRVLVAKPINNGKSDGVPLKLFGDNLATGLGITVKQMWNNWADKGLINKAKQNNLFLDPENINKHQASGFIRKQLVETSQIIKLATTILQAEYPKTKIIVVKASSNHYLRNEFDLYKSREVNDYHHAIDAYLTTICGNLLYQAYPKLRPFFVYGQFKKFSSDPKKENEILKKTKNFDFVAKLLGSKAPNEIRSQQGKVLFEKNKIRLQLNKAYNYKYMLVSRDTTTKNQEMFGMTIYPRAERDIAKSRKLIEKRKGFSTDIYGGYTGTAAAYMAIVRINKTKSSQYKVIAVPMTKRAILNKAEKEGNYEKILKQILSPSILYNDKGKRKAGVISFDIIKGKVPYNQVVQDGNKKFLLKSAIYLCNAKQLVLSEEAMRVITGHWLDSDKQDQELLDVYDEILEKIDRYLPLFDIRDFRNKLHKGREKFLKLNAEDKFKAIIQILKGLHDNSDTGELKDIGITVPFGQLQNNSGITLSSDTILVYQSPTGLFEKRVKISSL

SEQ ID NO: 1016 - protein, 206 aa, Lactobacillus crispatus
MQLGRDAYTGKPINIDEVSQYYDIDHILPQSFIKDDSLNNRVLVAKPINNGKSDGVPLKLFGDNLATGLGITVKQMWNNWADKGLINKAKQNNLFLDPENINKHQASGFIRKQLVETSQIIKLATTILQAEYPKTKIIVVKASSNHYLRNEFDLYKSREVNDYHHAIDAYLTTICGNLLYQAYPKLRPFFVYGQFKKFSSDPKKRK

SEQ ID NO: 1017 - protein, 857 aa, Lactobacillus crispatus
MTKLNNEYMVGLDIGTNSCGWVATDFDNNILKMHGKRALGSHLFDEGVSAADRRAFRTTRRRIKRRKWRLKLLEEIFDEEMAKVDPNFFARLKESGLSPLDTRKNVSSIVFPTKKMDKQFYKKFPTIYHLRNALMKQDKKFDLRAIYIAIHHIVKYRGNFLSNSSISNFSASKIEIDRFVNELNDLYSIFLPESGVIFDAGNASKVEDIIRNEQMFKLDKIKEIADVLPDTENKSGLKLSKKISKEISKAILGYKAKFEIILQVNVDKTDSSIWNFKLNDENADVNLSEITSDLTDTQLQILDLVRNLFSAISLLNIVDEGSTLSESMIRKYNDHAQDLKLLKTVIKNHSDRKKAHNLQLAYDKYVNNRHFVDVETKKAFPNKHLYRKSDFYEIVKKNLDASKEAVQIRKEIALDKFMPKQRSDENGVIPFQLNQIELDKIIENQGKYYPFLKEINPIKAHRMQAPYKLDELIRFRVPYYVGPMIEPTNSSYPQTRQNQSFAWMVRKAKGRITPWNFDEKVDRQKSANNFIKRLTTKDTYLFGEDVLPANSLLYQKYTVLDELNKISVNGKKLSVSVKQELYEDLFKKNNTVSAKQLKNWLIENQKLPYIKIKGLADQTKFNSSLSTYIKLKKSGLFVDKLDSNEFRDDFEKIIEWSTIFEDKQIYIQKLQTIDWLTAKQIQFLQNIRLQGWGRLSKKLLTAIVDSNGQNIIEQLWNSQQIFMSIVNKADIKGTITDANQDLMHSNSMEDILSEAYTSPANKKMIRQVVKVVHDIQKAASGQAPKQIAIEFARESRRNSKLSQTRGHKLQDIYQKISGDIVNKNLKDKLAEYIKNNQLSVWEKTSFQMNKNDQDFLF

SEQ ID NO: 1018 - protein, 857 aa, Lactobacillus crispatus
MTKLNNEYMVGLDIGTNSCGWVATDFDNNILKMHGKRALGSHLFDEGVSAADRRAFRTTRRRIKRRKWRLKLLEEIFDEEMAKVDPNFFARLKESGLSPLDTRKNVSSIVFPTKKMDKQFYKKFPTIYHLRNALMKQDKKFDLRAIYIAIHHIVKYRGNFLSNSSISNFSASKIEIDRFVNELNDLYSIFLPESGVIFDAGNASKVEDIIRNEQMFKLDKIKEIADVLPDTENKSGLKLSKKISKEISKAILGYKAKFEIILQVNVDKTDSSIWNFKLNDENADVNLSEITSDLTDTQLQILDLVRNLFSAISLLNIVDEGSTLSESMIRKYNDHAQDLKLLKTVIKNHSDRKKAHNLQLAYDKYVNNRHFVDVETKKAFPNKHLYRKSDFYEIVKKNLDASKEAVQIRKEIALDKFMPKQRSDENGVIPFQLNQIELDKIIENQGKYYPFLKEINPIKAHRMQAPYKLDELIRFRVPYYVGPMIEPTNSSYPQTRQNQSFAWMVRKAKGRITPWNFDEKVDRQKSANNFIKRLTTKDTYLFGEDVLPANSLLYQKYTVLDELNKISVNGKKLSVSVKQELYEDLFKKNNTVSAKQLKNWLIENQKLPYIKIKGLADQTKFNSSLSTYIKLKKSGLFVDKLDSNEFRDDFEKIIEWSTIFEDKQIYIQKLQTIDWLTAKQIQFLQNIRLQGWGRLSKKLLTAIVDSNGQNIIEQLWNSQQIFMSIVNKADIKGTITDANQDLMHSNSMEDILSEAYTSPANKKMIRQVVKVVHDIQKAASGQAPKQIAIEFARESRRNSKLSQTRGHKLQDIYQKISGDIVNKNLKDKLAEYIKNNQLSVWEKNSFQMNKNDQDFLF

SEQ ID NO: 1019 - protein, 347 aa, Lactobacillus crispatus
MVNLKSLVLILKKENEILKKTKNFDFVAKLLGSKAPNEIRSQQGKVLFEKNKIRLQLNKAYNYKYMLVSRDTTTKNQEMFGMTIYPRAERDIAKSRKLIEKRKGFSTDIYGGYTGTAAAYMAIVRINKTKSSQYKVIAVPMTKRAILNKAEKEGNYEKILKQILSPSILYNDKGKRKAGVISFDIIKGKVPYNQVVQDGNKKFLLKSAIYLCNAKQLVLSEEAMRVITGHWLDSDKQDQELLDVYDEILEKIDRYLPLFDIRDFRNKLHKGREKFLKLNAEDKFKAIIQILKGLHDNSDTGELKDIGITVPFGQLQNNSGITLSSDTILVYQSPTGLFEKRVKISSL

SEQ ID NO: 1020 - protein, 534 aa, Lactobacillus crispatus
RDAYTDKPINIDEVSQYYDIDHILPQSFIKDDSLNNRVLVAKPINNGKSDGVPLKLFGDNLATGLGITVKQMWNNWADKGLINKAKQNNLFLDPENINKHQASGFIRKQLVETSQIIKLATTILQAEYPKTKIIVVKASSNHYLRNEFDLYKSREVNDYHHAIDAYLTTICGNLLYQAYPKLRPFFVYGQFKKFSSDPKKENEILKKTKNFDFVAKLLGSKAPNEIRSQQGKVLFEKNKIRLQLNKAYNYKYMLVSRDTTTKNQEMFGMTIYPRAERDIAKSRKLIEKRKGFSTDIYGGYTGTAAAYMAIVRINKTKSSQYKVIAVPMTKRAILNKAEKEGNYEKILKQILSPSILYNDKGKRKAGVISFDIIKGKVPYNQVVQDGNKKFLLKSAIYLCNAKQLVLSEEAMRVITGHWLDSDKQDQELLDVYDEILEKIDRYLPLFDIRDFRNKLHKGREKFLKLNAEDKFKAIIQILKGLHDNSDTGELKDIGITVPFGQLQNNSGITLSSDTILVYQSPTGLFEKRVKISSL

SEQ ID NO: 1021 - protein, 278 aa, Lactobacillus crispatus
SVNGKKLSVSVKQELYEDLFKKNNTVSAKQLKNWLIENQKLPYIKIKGLADQTKFNSSLSTYIKLKKSGLFVDKLDSNEFRDDFEKIIEWSTIFEDKQIYIQKLQTIDWLTAKQIQFLQNIRLQGWGRLSKKLLTAIVDSNGQNIIEQLWNSQQIFMSIVNKADIKGTITDANQDLMHSNSMEDILSEAYTSPANKKMIRQVVKVVHDIQKAASGQAPKQIAIEFARESRRNSKLSQTRGHKLQDIYQKISGDIVNKNLKDKLAEYIKNNQLNKDKYY

SEQ ID NO: 1022 - protein, 277 aa, Lactobacillus crispatus
SVNGKKLSVSVKQELYEDLFKKNNTVSAKQLKNWLIENQKLPYIKIKGLADQTKFNSSLSTYIKLKKSGLFVDKLDSNEFRDDFEKIIEWSTIFEDKQIYIQKLQTIDWLTAKQIQFLQNIRLQGWGRLSKKLLTAIVDSNGQNIIEQLWNSQQIFMSIVNKADIKGTITDANQDLMHSNSMEDILSEAYTSPANKKMIRQVVKVVHDIQKAASGQAPKQIAIEFARESRRNSKLSQTRGHKLQDIYQKISGDIVNKNLKDKLAEYIKNNQLNKDKY

SEQ ID NO: 1023 - protein, 1368 aa, Lactobacillus curvatus
MSRPYNIGLDIGTSSIGWSVVDDQSKLVSVRGKYGYGVRLYDEGQTAAERRSFRTTRRRLKRRKWRLGLLREIFEPYITPIDDTFFLRQKQSNLSPKDQRKLYTQTSLFNDRTDRAFYDDYPTIYHLRYRLMTEKRQFDIREIYLAMHHIVKYRGHFLNEAPVSSFKSSEINLVAHFDRLNTIFADLFSESGFQLETDKLAEVKALLLDNQQSASNRQRQALSLIYTPSTNKAVEKQNKAIATELLKAILGLKAKFNVLTGIEAEDVKAWTLTFNAENFDEEMVKLESSLDDNAHQIIESLQELYSGVLLAGIVPENQSLSQAMITKYDDHQKHLKMLKAVREALAPGDRQRLKQAYDQYVDGQENTKAYSKEDFYGDITKALKNNPDHPIVSEIKKLIELDQFMPKQRTKDNGAIPHQLHQQELDRIIENQQQYYPWLAELNPNSKRQTVAKYKLDELVAFRVPYYVGPLITAEQQRQSSDAKFAWLIRKAEGRITPWNFDDKVDRQASANEFIKRMTTTDTYLLAEDVLPKQSLIYQRFEVLNELNGLKIDDQPITTELKQAIFTDLFMQKISVTVKNIQDYLVSEKRYASRPAITGLSDENKFNSRLSTYHDLKMIVGDAVDDVDKQADLEKCIEWSTIFEDGKIYSAKLNEIDWLTDQQRVQLAAKRYRGWGRLSAKLLTQIVNANGQRIMDLLWDTTDNFMRIVHSEDFDKLITEANQMMLAENDVQDVINDLYTSPQNKKALRQILLVVNDIQKAMKGQAPERILIEFAREDEVNSRLSVQRKRQVEQVYQNISNELLNNTEIRNELKDLSNSALSNTRLFLYFMQGGRDMYTGDSLNIDRLSTYDIDHILPQSFIKDNSLDNRVLVSQKMNRSKADQVPTDFTSVELGQKMQIQWEQMLRAGLITKKKYDNLTLNPDHISKYAMKGFINRQLVETRQVIKLATNLLMEQYGEDNIELITVKSGLTHQMRTEFDFPKNRNLNNHHHAFDAYLTAFVGLYLLKRYPKLKPYFVYGEYQKASQQDKWRNFNFLNGLKKDELVDENTEAVIWDKESGLAYLNKIYQFKKILVTRGVHENSGALFNQTLYAAKDDKASGQGGKQLIPAKQDRSTALYGGYSGKTVAYMCIVRIKNKKGDLYKVCGVETSWLAQLKQLTDEDSQKAFLEQKISPQFTKVKKQKGNIIEAVEEFEVIAPHILINQRFFDNGQELTLGSATYKHNEQELILDKTAVKLLNGALPLTQSEELAEQVYDEILDQVMHYFPLYDTNQFRAKLSTGKAAFMKLPWKSQWDGNKMVQVGQQVILDRILIGLHANAAMSDLKVLKMTTPFGMIQQSTGITLSADTQIIYQSPTGLFERRVALRDL

SEQ ID NO: 1024 - protein, 669 aa, Lactobacillus delbrueckii
MAKPKDYTIGLDIGTNSVGWVVTDDQNNILRIKGKKAIGARLFTEGKVAAERRSFRTTRRRLSRRRWRIKMLEELFDEEIAKVDPSFFARLHESWISPKDKRKRYSAIVFPSPEEDKKFHESYPTIYHLRDKLMKDDQKHDIREIYIAVHQMIKARGNFLHDESVETYRSGMSSLGGRSERNILSVQTLEELNDLFAENEGTEEVELNVASAEQINDILTGGHLNADSQKEISNLLLPSSFPSFDDKAKEKQVKKLINNVATNISKAWLGYKADFSTILNLAKVDKDQKKIFAFALQGGDEEDKVQELESLLEQSQTDIVDRLIEIRHAIVLSEIVPVGMTLSEAMIDKYDQHKEDLITLKAVIRNTKDKKKAAKLQAIYDLYVKKRHADLAKAMKLTGIKKRSELLDPEELKKGISSLLDDSPEAVEIKQRLEEKTFLPLQRSNNNGVIPNQLHQVELDEIIKKQSKYYPFLAEKNPDESEEAQKKAPTKLDALLTFRVPYYVGPMITKEEQEAQNGHSFAWMVRRDPQDHEAITPWNFEKKVDKMASATQFIKRMTTKDTYLLGEDVLPASSLKYQLFTVLNELNNLRVNGKKLTSDEKEQVIEGLFKKQKTVKADKFVKYWQAKHIGADIKVKGLSDPSKFNSTMSTYIDFKKIFGDQLNDVNRQR

SEQ ID NO: 1025 - protein, 544 aa, Lactobacillus delbrueckii
MTGCADYDVDHIMPQSFVKDDSLDNRVLVARAVNNQKSDKVPALLFGNKVVADLGITVREMWDKWQKLGMISKRKLSNLLTDPDALTEYRAQGFIRRQLVETSQVIKLTATILQSEFPDSKIIEVPAKYNSIVRKQFDLYKSREVNDFHHAIDAYLSTIVGNYLYQVYPNLRRMFVYGEFKKFSSNAEESAHDVARRVKSMNFLDDLLRGTHGDNIYCRSTGEIVFNRNDIISKLKQAYSFKQMLVTQEVFTKKSALFDQTVYPSPERDSKKRSGLIPRKKGMDTEIYGGYSGNKDAYFVLAEAVKEKGHTLQIVGVPIRALNTLKNSANYSEKLLEIIKPQVMFNKDTGKPIKGIKDVKILMDKIPCRQPVLEGESYYMLASSKYRYSLKQISLSQMSMKYILDYIDDPNFNKHEMINIDQQDEKECLLSVYDEILEKMDKYLPLFDIRSFRKKLHDGRDAFIALPVASEEKKPGEVDVIRKILKGLHANADITNLAELGFGTAALGALVSTGGIKISDDAVFIYQSPTGLFERRVKVSDLLK

SEQ ID NO: 1026 - protein, 1356 aa, Lactobacillus farciminis
MTKKEQPYNIGLDIGTSSVGWAVTNDNYDLLNIKKKNLWGVRLFEEAQTAKETRLNRSTRRRYRRRKNRINWLNEIFSEELAKTDPSFLIRLQNSWVSKKDPDRKRDKYNLFIDGPYTDKEYYREFPTIFHLRKELILNKDKADIRLIYLALHNILKYRGNFTYEHQKFNISNLNNNLSKELIELNQQLIKYDISFPDDCDWNHISDILIGRGNATQKSSNILKDFTLDKETKKLLKEVINLILGNVAHLNTIFKTSLTKDEEKLNFSGKDIESKLDDLDSILDDDQFTVLDAANRIYSTITLNEILNGESYFSMAKVNQYENHAIDLCKLRDMWHTTKNEEAVEQSRQAYDDYINKPKYGTKELYTSLKKFLKVALPTNLAKEAEEKISKGTYLVKPRNSENGVVPYQLNKIEMEKIIDNQSQYYPFLKENKEKLLSILSFRIPYYVGPLQSAEKNPFAWMERKSNGHARPWNFDEIVDREKSSNKFIRRMTVTDSYLVGEPVLPKNSLIYQRYEVLNELNNIRITENLKTNPIGSRLTVETKQRIYNELFKKYKKVTVKKLTKWLIAQGYYKNPILIGLSQKDEFNSTLTTYLDMKKIFGSSFMEDNKNYDQIEELIEWLTIFEDKQILNEKLHSSKYSYTPDQIKKISNMRYKGWGRLSKKILMDITTETNTPQLLQLSNYSILDLMWATNNNFISIMSNDKYDFKNYIENHNLNKNEDQNISDLVNDIHVSPALKRGITQSIKIVQEIVKFMGHAPKHIFIEVTRETKKSEITTSREKRIKRLQSKLLNKANDFKPQLREYLVPNKKIQEELKKHKNDLSSERIMLYFLQNGKSLYSEESLNINKLSDYQVDHILPRTYIPDDSLENKALVLAKENQRKADDLLLNSNVIDRNLERWTYMLNNNMIGLKKFKNLTRRVITDKDKLGFIHRQLVQTSQMVKGVANILDNMYKNQGTTCIQARANLSTAFRKALSGQDDTYHFKHPELVKNRNVNDFHHAQDAYLASFLGTYRLRRFPTNEMLLMNGEYNKFYGQVKELYSKKKKLPDSRKNGFIISPLVNGTTQYDRNTGEIIWNVGFRDKILKIFNYHQCNVTRKTEIKTGQFYDQTIYSPKNPKYKKLIAQKKDMDPNIYGGFSGDNKSSITIVKIDNNKIKPVAIPIRLINDLKDKKTLQNWLEENVKHKKSIQIIKNNVPIGQIIYSKKVGLLSLNSDREVANRQQLILPPEHSALLRLLQIPDEDLDQILAFYDKNILVEILQELITKMKKFYPFYKGEREFLIANIENFNQATTSEKVNSLEELITLLHANSTSAHLIFNNIEKKAFGRKTHGLTLNNTDFIYQSVTGLYETRIHIE

SEQ ID NO: 1027 - protein, 1313 aa, Lactobacillus fermentum
MHYLDEIFAPHLQEVDENFLRRLKQSNIHPEDPAKNQAFIGKLLFPDLLKKNERGYPTLIKMRDELPVEQRAHYPVTNIYKLREAMINEDRQFDLREVYLAVHHIMKYRGHFLNNASVDKFKVGRIDFYKSFNVLNEAYEELQNGEGSFTIEPSKVEKIGQLLLDTKMRKLNRQKAVAKLLEVKVADKEETKRNKQIATAMSKLVLGYKADFATVAMANGNEWKIDLSSETSEDEIEKFREELSDAQNDILTEITSLFSQIMLNEIVPNGMSISESMMDRYWTHERQLAEVKEYLATQPASARKEFDQVYNKYIGQAPKERGFDLEKGLKKILSKKENWKEIDELLKAGDFLPKQRTSANGVIPHQMHQQELDRIIEKQAKYYPWLATENPATGERDRHQAKYELDQLVSFRIPYYVGPLVTPEVQKATSGAKFAWAKRKEDGEITPWNLWDKIDRAESAEAFIKRMTVKDTYLLNEDVLPANSLLYQKYNVLNELNNVRVNGRRLSVGIKQDIYTELFKKKKTVKVSDVASLVMAKTRGVNKPSVEGLSDPKKFNSNLATYLDLKSIVGDKVDDNRYQTDLENIIEWRSVFEDGEIFADKLTEVEWLTDQQRSALVKKRYKGWGRLSKKLLTGIVDENGQRIIDLMWNTDQNFMQIVNQPVFKEQIDQLNQKAITNDGMTLREWVESVLDGAYTSPQNKKAIWQVVRVVEDIVKAVGNAPKSISIEFARNEGNKGEITRSRRTQLQKLFEDQAHELVKDTSLTEELEKAPDLSDRYYLYFTQGGKDMYTGDPINFDEISTKYDIDHILPQSFVKDDSLDNRVLVSRAENNKKSDRVPAKLYAAKMKPYWNQLLKQGLITQRKFENLTMDVDQNIKYRSLGFVKRQLVETRQVIKLTANILGSMYQEAGTDIIETRAGLTKQLREEFDLPKVREVNDYHHAVDAYLTTFAGQYLNRRYPKLRSFFVYGEYMKFKHGSDLKLRNFNFFHELMEGDKSQGKVVDQQTGELITTRDEVAKSFDRLLNMKYMLVSKEVHDRSDQLYGATIVTAKESGKLTSPIEIKKKRPVDLYGAYTNGTSAFMTIIKFTGNKPKYKVIGVPTTSAVGLKRVGKPGSESYNQELHRIIKSNPKVKKDFEIVVPHVSYSQLIVDDDCKFTLASDTYQHPATQLVLSKESMEIIADDFKFVKENTATADEQLVRVFDEIVNQMNHYFTIFDQRSNRQKVTKARDKFVSLPTESEYEGAKKTQVGKTEVITNLLMGLHANSAQGDLKVLGLSTFGFFQSSGGLNLSEDAMIVYQSPTGLFERRICLKDI

SEQ ID NO: 1028 - protein, 1327 aa, Lactobacillus florum
MTEQQQPYNIGLDIGTSSIGWAVTDQNDKLLHIRGHNGIGVRLFKEGESAAERRGFRTTRRRLSRRRWRLRFLDRIFDAELAKVDPNFLARLKQSNISPLDPNKQMFGNILFDDPQFDDQKFHQQYPTIYHLRSALAQPDAPQADVRLIYLALHHMIKFRGHFLNGAAVEKFHGGQLHLESEFQELNQIFSNQQRDHVQLQTSSLDEVATILKDNQRTPSDRQRELSARLFVPVDKTIDKENKKLATELLKAVLGLKAKFDVILGVEATDPQAFKLQFSSDDFDDKIAELASELTDEANEILTVLQRLYFSLNLADILTNRQTKQVADSISTAMINRYDDHKHHLKMLKELEAQVTQEQRDGLKKAYDEYIDGDKPTIDTFYTNIKKNLDDSELANQIKSLIDLQAFMPKQRSKENGSIPHQLHQRELDQLIEVQGKYYPWLLAAKDKLDALIAFRVPYYVGPMIDPNQSDDPQNTKFAWMVRKEAGEITPWNFEEKVDKTSSATNFIKRMTTTDTYLLGEPVLPKNSLLYQQFTVLNELNKLKVNGKALTVDQKKYLYEHVCKKQRRVTLKKLSDCLMARGDFPMGAIFTGTTDQKNMNNTLKTYQDFQEIFGDEIDNPDRQVDFEKMIEWSAIFEDREIFKLKLAELNWLTSEQLERVSKKRYQGWGRLSQKLLTHIVNENGERIIDQLWNTNQNFMEIMGQDSVKQAIQEHNGANVAQTGINETIDELYTSPQNKKAIRQILLVVDDIKKAVGYAPANIMMEFAREDRDDHRLIASRARQLEKTYQEISKNWFDNESVTQELKDQIKNKTKFTDRLYLYFIQGGIDLYTGHPLNIDQLSSYDIDHILPQSFLLDNSLNNRVLTSQAENRVHKEDRLPGETVANKMRPTWKMMREQGLMTQRKYNNLTLKPDQISKFNNRGQFINRQLVETRQVIKLAADIMSQKYQADQTKVVTVKANLTHHMREKFNFYKSRNVNDYHHAFDAYLTLFVGNWLLKEYPKLQPYFVYGDFAKTGTNNLKSFNFLYRFERDHKLNDKGAIDTDKDQQLGYMKRIYRFKKMLVTKQLETNEGALYGQTLYPAPKNDKKTRNLINSKKNRPSDIYGGYSNENGSFLTLVKLKKGSKYDYRLVAVPVSKISEIKESELATIEKAIAPQFLKSSGKYRDFQVVLSKILINQKVIDDGMIFTIGSKSYKHNAKQVVLSDNSIQIVSTLSRISDKEKLITVFDEIVDITSKYLPWYKVNDVEKTKMLFRQMQDIDEMKKIIDNSLIGLHCNASITDLGKVGLSKYWGRFVLTAGISLTVDAQLIYQSPTGLFEHRVKVSDL

SEQ ID NO: 1029 - protein, 1386 aa, Lactobacillus hominis
MTKITEDYIVGLDIGTNSCGWVAMDSKNTILRMHGKTAIGSHLFDAGNSAADRRAFRTTRRRIKRRKWRLKLLEEIFDSHLAKVDPYFFARLKESGLSPLDTRKNVSSIIYPTSLEDKKFYVDNPTIYHLRYKLMTEDRKFDLREVYLAIHHIVKYRGNFLYNTPVKAFEASKIDVKGSLKKLNELYEGLDSEFNVELDSNNALEIENIIRDKKIFKINKVKEINQLLSLKTEDKERTKLMKDVSKQIVNAILGYKTKFETILLKDVSKDEADDWEFKLTDVDADNKFENLIGDLNENEQEILLVIRKLANAITLSNIVEEGKTLSESMKDKYKKHSDDLKLLKQVISDHPDRDKAKKLALAYDLYVNNRHGKILQAKDILEKKKTLSKEDFYKEIKKNLDDSKESQEILDAISLDSFMPKQRTNENGVIPYQLHQLELDKIIENQGKYYPFLKEVNPVSSHLKQAPYKLDELIRFRVPYYVGPLISPNESTKNKQTKKNQNFAWMIRKEQGQITPWNFDQKVDRMASANKFIKRMTTIDTYLLGEDVLPANSLLYQKFTVLNELNNVKINGKRISVPLKQELYNNLFKKNSTVTTNKLKSYLKENYKLIKVEIKGLSDEKKFNSGLTTYNKLKNLKIFDQQIDDPNYNKDFERIIEWSTIFEDKAIYKEKLKTIDWLSDRQIDKLSKIRMQGWGQLSKKLLSQLTDNNGQTIIEQLWDSQNNFMQIVNQADFKDAIAVANQNLLVDTSVEDILNEAYTSPANKKAIRQVVKVVDDIVKATSGKVPKQIAIEFTRDADDNAKISQSRANKLRKVYKEMSNELASETIRNELERVAKDQKLLKDKHYLYFMQLGRDAYTGELIDIDNLEQYDIDHVLPQSFIKDDSLENRVLVKKAVNNGKSDNVPVKLYGNRMATDLGMTIRHMWEKWKEQGLITKTKYNNLIIDPDKINKYESSGFIHRQLVETSQIIKLVSTILQSKYPDTEIIVVKARYNHYLRKRLNLYKSREVNDYHHAIDAYLSAICGNLLYQVYPYLRPFFVYGQYKKFSSEPEKEKIIYDKTRRYNFISQIFENKDNDIISRETKKKVFDKKDIIEKLKRAYNYKYMLVSRETETHDQEMFKMTVYPRLSRDTKKSRNLIPKKKDMPTEIYGGYTNNSDAYMIIARINKKKGPEYRVFGVPMRELVNLRKAEKNGHYKAYLKQVLEPEIMYSKNGKKNKTISSFEIVKAKVPYKQVILDGDKKFMLASSTYVQNAKQLTLSQYSMQAITDNCENDTEEEKALVEAYDEILTNIDKYLPLFDINKFREKLHAGREKFVDLPLAEKKETILQVLNGLHDNAVMPKIKSLGLSTPLGFMQFHTGVSLSENAKLIYQSPTGLFEKRLKISDL

SEQ ID NO: 1030 - protein, 270 aa, Lactobacillus iners
MITYLKDNDDITLSFPKDQLINIFKNSNLNSTEKSDQLKPFFGRTNLEKGIIKLLSGGKQDLSNMFRDETLKNSNYKNLKFSDNRFDDERDGYAADLGDRIDLLILLKQIYDASILESMMSQARVSIDGHKYISSAKVCAYEKHKSDLKRLKSLIKKYLPSEYNNIFRKITEKDNYVAYSKSNITNNKREKALKYVKYVDFTKYLTKKLKTIKTQDAEDDQEIFEIKGELEKQSFLPKQRTLDNSIIPYQLHLMELKKYLIINLNIMTFC

SEQ ID NO: 1031 - protein, 255 aa, Lactobacillus iners
MITYLKDNDDITLSFPKDQLINIFKNSNLNSTEKSDQLKPFFGRTNLEKGIIKLLSGGKQDLSNMFRDETLKNSNYKNLKFSDNTFDDERDGYAADLGDRINLLILLKQIYDASILESMMSQARVSIDGHKYISSAKVCAYEKHKSDLKRLKSLIKKYLPSEYNNIFRKITEKDNYVAYSKSNITNNKREKALKYVEYVDFTKYLTKKLKTIKTQDAEDDKEIFEIKGELEKQSFLPKQRTLDNSIIPYQLHLME

SEQ ID NO: 1032 - protein, 343 aa, Lactobacillus iners
MLAKDDQEGITVKDKIISLLTFRLPYYIGPVNPAVHGKFAWVKRLANGKVTPWNYKEKIDIDASHEEFIKTKLSKCSFLIGCDVLPKNSLLYQKYMVLSELNTIKFNGVNISEKLKDDIYQNLFKNIQKVTKKRLQNYIKEHENIIGDVIVTGIDNAFKQGLVSYLKFKKIIGDKIDDDRYQKVLEKIIRDITLYDECAGKKIKKEYKDSDLFTEDELNKIVKLTFNDWGRLSAELLDQLEGEDTVSGETGKIIEFMQKHNYNLMQLMSKKFTFKYKIDEINKSYYQHDKFNYKSMIDSLYVSPATKRILWQSLKVVHEISKIMKHDPEKIFYRNGTFQRRSS

SEQ ID NO: 1033 - protein, 447 aa, Lactobacillus iners
MLYDHKLIGDKKYARLIRSKAFTDDELAGFIARQLVETRQATKETADLLKRLCPKSRIVYAKAQNASIFRQKFDIPKSRTINDLHHAQDAYLNIVVGNIFDTKFTQDPRNFIKNTKDSRNYNLEKIYDYNVERNNYVAWIAPDSKTNGTIANVKCNLSTKDFRVTRPSFYKKGALFNQNLSRKGSNLAPIKEHSPKSNPLKYGGYSGKNNSFFVVVAGKDNKGKDIVKLIPVNTLIYNKMLHCDYKAKQELLTSYVANNFAINNFRIVKDDIKMYSLVKIDGAYYYLVGGTDERIEVKNAMQLLLSKDSIKAVKILEKESKDQFANIKNYKDIDIKLGRTFNEVISKYTNSVFGKSMLISDKYRKDIFKSVDKSILEFNSLNTIAKADNLLKFVTSMRPAGSVDALKMVGLIERIRKSNVISNFNEFKLINQSVTGLFENEEDLLKL

SEQ ID NO: 1034 - protein, 667 aa, Lactobacillus iners
MQKHNYNLMQLMSKKFTFKSKIDEINKSYYQHDKFNYKSMIDSLYVSPATKRILWQSLKVVHEISKIMKHDPEKIFIEMARSKEDHPKRKLSRKADLKQVYKDSKKQIISIIGKDKYQDLSNELDNKDDRDLRWDNLYLYYTQLGRSMYSLKPIDISELMNKNLYDQDHIFPKSKKYDDSIENRVLVEKELNVKKSDIYPISDANIIPQKIKGQVESFWKMLYDHKLIGDKKYARLIRSKAFTDDELAGFIARQLVETRQATKETADLLKRLCPKSRIVYAKAQNASIFRQKFDIPKSRTINDLHHAQDAYLNIVVGNIFDTKFTQDPRNFIKNTKDSRNYNLEKIYDYNVERNNYVAWIAPDGETNGTIANVKCNLSTKDFRVTRPSFYKKGALFNQNLSRKGSNLAPIKEHSPKSNPLKYGGYSGKNNSFFVVVAGKDNKGKDIVKLIPVNTLIYNKMLHCDYKAKQELLTSYVANNFAINNFRIVKDDIKMYSLVKIDGAYYYLVGGTDERIEVKNAMQLLLSKDSIKAVKILEKESKDQFANIKNYKDIDIKLGRTFNEVVSKYTNSVFGKSMLISDKYRKDIFKSVEKSILEFNHLDTIGKADNLLKFVTLMRPSGSAHSLKMVGLIERIRKSNVISNFNEFKLINQSVTGLFENEEDLLKL

SEQ ID NO: 1035 - protein, 1395 aa, Lactobacillus jensenii; identical to SEQ ID NO: 113

SEQ ID NO: 1036 - protein, 1382 aa, Lactobacillus mucosae
MDIGTNSIGWTAIDDHFSLLRVKGKNAIGVRTFKEGETAADRRGFRTARRRLSRRRWRLQFLDEFFAPYLAEVDPNFLARLKQSDISAKDPAKNQEYMGKLLFPDQEAASDGNGYPTLIQMRKAMPAEKAADFPVFNIYQLRYALMNEKRKFDLREIYLAVHHIVKYRGNFLNNTSVDKFKADQIDFNKSFETLNDLFRQVQPIAPFQIDLTKVDELGKLLLDTKQKKLDRQKAVAKLLPLIEDGTDKEIVKAHQQTAREISKLILGYKAKVGLILQNNLDQTLDMSTENSDDQLMQIAEELDDYQMELINQLSLLYSQIMLNEIVPNGETVSASMLNRYYKHRCQLKELKDYGAAQDKKTREQLDHLYAEYIGQIPKDSKFDFTKDLKKLMDKSDLGQKIKDEIEAGDYLPKQRTSANGVIPHQMHQQELDQIIENQKEYYPWLAEPNPVEKNIKNAKYKLDQLVSFRVPYYVGPMITLADQQKTSKASFAWAVRKKAGKITPWNFYDMIDREKSANNFIKRMTNKDTYLLSEDVLPASSLLYQKFTVLNELNNIRVNGRKLQPALKQAIYTDLFQKRKTVNLKTLTNFLAIHEPTLTKPKIEGLSNGRSFNSSLGTYIDMSKILGDSLDDLNYRDDIEKIIEWSTVFEDSEIYGVKLQEIQWLTNEQREKLVRKRYQGWGRLSKKLLTGITDENGQRIIDLMWDTSKNFMQIVHQPVFEEQIAELNQQLLQDADKAPLEVVDDILADAYTSPQNKKAIRQVVKVVADVVKAVGNAPASISIEFARNEDRNKELKNSRRHSIEKLYHETAEKLVKQTNLLEELGNVKDLNDRYYLYFTQAGRDMYDGTPINIDEISTHYEIDHILPQSFLKDNSLDNRVLVKKSENAAKSDRVPAKLYGAKMRAFWKQLKESQLISNRKYLNLTTDPEQVDKYQMQGFVHRQLVETRQIIKLAANIFGSLYPDSAVIETRAELTKQLREKFSLYKVRDVNDYHHAVDAYLTAFAGHYLYQRYPKLRPMFVYGDYAKIYADDLKRLRSVNLFHDLEKDQYNSGTAVNPETKEKIVDVDWLSDYVSKIQHFKYMLISKAVYTQHGQLYGATILPVAQVDKISAPIGIKDDKPVDIYGAYTNEVAAYMAIVRVNGKKPKYKVVSVPVRMLQRLKMAEQKGHDQYMQTLHDVLLRNFTSLKKNRKTGLKEAVVKDFDVLVPCVRYNQLVIDGDTKFTLGSATYQHNAKQLVLCNHSLETLANNFEYVRKHPDEADERMIMLYDDILDQVNHYFTLYDKNKFREKLNAGRDKYLKLPTFSQFENNKKTAIGKSEAIINILRGLHANAAITNLKCLGVSTPFGQLQSPSGIELSENAKLVYQSPTGLFSREVLLKDL

SEQ ID NO: 1037 - protein, 1382 aa, Lactobacillus pentosus
MKKIVNYNLGLDIGTSSIGYAAIDDQGRPVRHQNKTVMGVRLFKEGKTAESTRIFRGTRRRLSHRHWRLGYLDRIFDNEIAKVDENFLPRLKASKRARSDEKRSFRGSLLFPETGDDAYYQKYPTIYHLRYALITQKKQFDIRLIYLALHHMIKYRGNFLDTTPVSAFNIHDIDLTDQFASLNDCYQLLDMDFEFQFDLNNIEQVQKLLLDETLSKTKRQAAVSKVLVMSTGNKAFDDQQNGIASEFIKALLGGPFDLSKILNLSVADVKSWKLHMTDKDVDDTLNSLVEELDENHKQIVNLLQMIYSQVMMLGLLNGQQSISASMIERYDDHAKHWAALKKLLPALGEQEQSTIIHAYTAYTGHSRTKQLSRAEFYTKVNSILKKHENIAEATGLIELIDRNEFMPKQRDAVNGVIPHQLHQRELQLIIQNQQKYYPFLAAKAYPDADETMIEQLLSFRVPYYAGPLVDRDFINESSDQEQAMQNTKFSWLKRREAGEITPWNFEQKVDVQETANRFIKRLTTKDTYLMTEDVLPKESLIYQRFEVLNELNAIRINDRRLTAENKQLAFQQLFMAGNTKNVSIKKFRNFVFDSLKFPEKVKITGFAGQHNFLAKLSTYHDFKKIFGERVDHTDLQPDFERIVEWCTIFEDRHIYREKLKEIQWLSQSEIDQLVLIRNHGWGRLSKRLLTGIRDSDGRTVMDQLWFGTDNFMRIISQSDFAAAIANENRTQLNQHGLEDVLDSAFMSPQNKKAIRQVLKVVDDIEQTLGCPPKKVMIEFTRSPDKKKQRTVTRLEKVQQAYKAVADQLAGQSIVSELDQYANTHSKLSDTYYLYFMQLGRDLYSGKPIDIDSPMLDDDHILPRAFMKDNSLDNRALTEKPINNTKAAKFPSKVFGQQKEVTDFWKLLRRCGLMSNIKEKHLYLDPDNVDKWTRRGFIHRQLVETSQVIKIVANILNDRYQQSQTEVLEVPARLGTELRECFGWYKVREVNDYHHVFDAYLAAFIGNYLYRRYPKLQPYFVYGNFAELNKAQLKNIKSFNFLYNITDNKRVVKDIETGQTLWDDQIRQQIQHIYEYKYMLTSHEAFTQHKELYGQTIYPRREFKPGTLKAIKQDQPQELYGGYKNLTAAYMCIVKIQARKRRAAEYRVVRVATESLSALQQAKRLGVQAYERCLRQELVRNNEILRTNADPNSAPREFEVLLDRVLCHQMIISDGQKYLLGSHAYKINCMQLVLSNNSMKILSTSIVKLKQMTNEPLVQVYREILDVVNKYFTLYDVNSFRENLNQFFDKFRTLPITNEYESSKSGKKLIHRGQLETLTLILRGLHANSDKVQYGDQSTLLGGFQTKDGIKLSKDSVIQYTSPAGLNVRTVKLRDLEQKEAQK

SEQ ID NO: 1038 - protein, 1361 aa, Lactobacillus pentosus
MNEPYGVGLDIGTNSVGWTVVDMNGRVRKVKGKTALGARLFKEGATAEDRRGFRTTRRRLKRVKWRLRLLREFFDQPISKIDPNFFARRKYSDISPRDPNYNGLAKTLFNDRTDKEFYDDYATIYHLRDKLMTSNRKFDIREIYLAIHHIVKYRGNFLRTGPASQYGSASLHLATSFQKLNDLFAQSEETLNLKLVTDEALLQQIQQILVRTDLSRSEQQRQIWPLMAVLTGASAAEKKRQKNVVVELSKALVGLKAKMNVVTLTEVDAAVVKDWTFTMEESQDKLPEIEEQLSEVGQQIMDEVIQLYASVNLAQLIPAGKRFSQHMVEKYKHHEKNLELLKAYIHSQSDSKRGREIRATYDRYIDGVDSKPVTQEMFYKDLMKYVEADATSNHLAAEIKDEIDSEQFMPKLRTKQNGSIPYQVQQYELDQIISHQKKYYPWLGEENPVAERRGKFPYKLDELVGFRVPYYVGPLITKEDQQATSGAGFAWMVRKADGPITPWNFDQKVDRIASATAFIQRMQTTDTYLIGEDVLPARSLIYQRFMVLNELNNMRVEDRKLAPQQKQRLYNQVFKQHQHVSVKNIQQNLMDAGEYRKTPQITGLADPKGFNSSLSTYHDFKKILLEAIADEHKRADIEKIILWSTTFEDSAIFKQKLEEVAWLTDAQRKQLSGLRYRGWGQLSHKLLTAFKDDKGRSIMDGLWETSDNFMQLRKQPAIETQIKEANQANLTDADIQDTINELYTSPQNKKAIREVMLVLDDIKNAMHGQTPSWIFVEAARGGGVAGRRTQSRSSQIVEAYKGTAKEIVSEKVQHELNEKIKAKADFNTRLVLYFLQNGRDLYTNEAINIDRLSEYDIDHILPQSLVKDDSLDNRVLTSARINREKNDTFASEKFGRKMGAQWRELHRNGLMTQRKLKHLLMRPDEISKHATDFINRQLVETRQVIKLVEELISSEYPAASIVAVKANLTHQFRQTFNFPKLREVNDYHHAFDASLTAFIGMYLLKQYPKLERFFVYGKFAKQPINLTRFNIIRKLAVAEKPIANIETGEILWDKTADIKYFEKLYNYKRLLVTHEVRENYGAMFKQTLFKASYNKSKTLVPKKNHMETSVYGGYSNQETAYLAIVRIPFKSGFKFIVVGIPTRMVAKIKHYQSLGATLNQATHKVIEPKFTKISRKTKQTVISDYEVVLPKVYLDQVVRDQVKGQMYRFSLGSDKEYHNVQELYLPLSIQQAFVGHYDESDDQRSNDLVKVYDAALKQLQRYFPLHLSRNFDQVASQAHQSFEGLKNNVQTSDKQLGKKEVLNSLFVGLHANATRSNLSVLGMSKDFGRIKSNGITLTDQAEIIYQSPTGLFERKVALKDL

SEQ ID NO: 1039 - protein, 1358 aa, Lactobacillus pentosus
MNEPYGVGLDIGTNSVGWTVVDMNGRVRKVKGKTALGARLFKEGATAEDRRGFRTTRRRLKRVKWRLRLLREFFDQPISKIDPNFFARRKYSDISPRDPNYNGLAKTLFNDRTDQEFYHDYPTIYHLRDKLMTSDRKFDIREIYLAIHHIVKYRGNFLRTGPASQYGSASLHLATSFQKLNDLFAQSEESLNFKLVTDEAQLQQIQQILVRTDLSRSEQQRQIWPLMVVLMGATAAEKKRQKDFAKELANALVGLKAKLNVVTLTNVDTTVVKDWTFTLEESQDKLPEIEEQLSEVGQQIMDEVIQLYASVNLAQLIPAGKRFSQHMVEKYNHHEKNLELLKAYIHSQSDSKRGREIRATYDRYIDGVKSKPVTQEMFYKDLMKYVEADATSNHLAAEIKDEIDSEQFMPKLRTKQNGSIPYQVQQYELDQIISHQKKYYPWLGEENPVAERRGKFPYKLDELVGFRVPYYVGPLITKEDQQATSGAGFAWMVRKADGPITPWNFDQKVDRIASATAFIQRMQTTDTYLIGEDVLPARSLIYQRFMVLNELNNMRVEDQKLAPRQKQRLYNQVFKQHQHVSVKNIQQNLMDAGEYRETPKITGLADPKGFNSSLSTYHDFKKILPEAIADEHKRADIEKIILWSTTFEDSAIFKQKLEEVAWLTDAQRKQLSGLRYRGWGQLSHKLLTAFKDDNGRSVMDGLWETSDNFMQLRKQPAIETQIKEANQANLTDADIQDTINELYTSPQNKKAIREVMLVLDDIKNAMHGQTPSWIFIEAARGGGVAGRRTQSRSKQIVEAYKSTAKEIVSEKVQHELNEKIKAKADFNTRLVLYFLQNGRDLYTNEAINIDRLSEYDIDHILPQSLVKDDSLDNRVLTSARINREKNDTFASEKFGRKMGAQWRELHRNGLMTQRKLKHLLMRPDEISKHATDFINRQLVETRQVIKLVEELISSEYPSASIVAVKANLTHQFRQTFNFPKLREVNDYHHAFDASLTAFIGMYLLKQYPKLERFFVYGKFAKQPINLTRFNVIRKLAVAEEPIANIETGEILWDKTADIKCFEKLYNYKRLLVTHEVRENYGAMFDQTIFKATDSRKRLIQKKKGFATETYGGYTGRTLAYLAIVKVVTNKDTQYQVVGIPTTMVTQIQQLEASGLTSKQAVTKAIGAMINENNKKLQSYEVLLPKVRFEQVVRDEVKGHIHRFALGTDTYYHNIQELYLPLTIQRAFLGKRNDTDAQTEQNLLTVFETTLAQVNRYFPLYEMNKFKQILNSAQEKFAALPTKNKTVKNKLVTGKDGVLNNLFIGLHANASLGDLKILGMKIGFGKLQVPGGLKLTDQAEIIYQSPTGLFERKVALKDL

SEQ ID NO: 1040 - protein, 1358 aa, Lactobacillus plantarum
MKEPYGVGLDIGTNSVGWTVVDASGHVRKIKGQTGIGVRLFKEGAAAADRRGFRTTRRRLKRVKWRLRLLREFFDQPISKVDINFFARRKYSDVSPRDPNYNGLEKTLFNDRSDQDFYHDYPTIYHLREALMTQHRKFDVREIYLAIHHIVKYRGNFLRNDAATAYRSGTLDLQQHFETLNHLFSQADLELNLNLTTDVALLDSIKQTLVRTDISRSDRQKLIMPLLAVLTGATTAEKKRQKAVVTEFAKALVGNKTKIDVLTLTDIDATEAKDWAFSLEENQDKLPGIEDRFSEVGQQIIDEVIRLYASVNLAQLIPEGKRFSQSMVEKYKRHGEDLKLLKAYIRSQSDAKRGRAIRATYDQYIDGVKSKQVTQEAFQKALGKFVDADVDLNSWAAQIKQAIDSEQFMPKLRTKQNGAIPYQVQQNELDQIISNQKEYYPWLGEENPVIKRRGKFPYKLDELFGFRVPYYVGPLITKEMQAATANAGFAWMVRKADGPITPWNFDDKVDRVASATAFIQRMQTTDTYLIGEEVLPARSLIYQRFMVLNELNNIRVDDGQLTPRQKQRLYNQVFKKHKRVTAKNIQDNLVAAREFPTAPRITGLADPKVFNSSLSTYHDLKQVLPEAMSDVRKQADIEKIILWSTIFEDSTIFKQKLTEISWLTAAQLKQLGQLRYRGWGQLLRKLLTGLKDDNNRSIMDGLWETNANFMQLRSQPAIENQIKSANQANLTTADLQDTINELYTSPQNKKAIREVMVVLADIKDAMHGQTPNWIFVEAARGGGVAGRRTQSRSKQIVAAYQGTAQAIVRDQVQRELKEKIKNKANFNTRLVLYFLQNGRDLYTGDAINIDRLSEYDIDHILPQSLVKDDSLDNRVLTNARINREKNDTFASEKFGKKMGAKWKEMHRMGLMTKRKLDHLLMRPDEISKYATGFINRQLVETRQVIKLVEELINAEYPSTAIVSVKANLTHQFRQTFDFPKIREVNDYHHAFDAALTAFIGTYLLKRYPKLERFFVYGKFAKQPVNLTRFNVIRKLAKTDTPITDIDTGEVLWDKLTDIKYFETLYDYKRLLVTREVSENYGAMFDQTLLKASDNGKRLIRKKQSFDTAIYGGYTGKTLAYMAIVKVSTKKDVQYQVVGVPTTMVTQIEQLEQQGMTNKQAVTKVIEPLIAANNKKMLTYEVLLPKVRFEQVVRDRIKGQTHRFALGTDTYYHNIQELYLPLTLQRAFLGKQNESEVQLNQNLLTVFDATLAQVNRYFPLYEMNKFKKILNSARDQIELLEAKNQFVKNKLVLGKQGILTNMFIGLHANASYGDLKVLGVKIDFGKLQVPGGIKLTGDAEIIYQSPTGLFERKIALKDL

SEQ ID NO: 1041 - protein, 1361 aa, Lactobacillus rhamnosus
MTKLNQPYGIGLDIGSNSIGFAVVDANSHLLRLKGETAIGARLFREGQSAAERRESRTTRRRLSRTRWRLSFLRDFFAPHITKIDPDFFLRQKYSEISPKDKDRFKYEKRLFNDRTDAEFYEDYPSMYHLRLHLMTHTHKADPREIFLAIHHILKSRGHFLTPGAAKDFNTDKVDLEDIFPALTEAYAQVYPDLELTFDLAKADDFKAKLLDEQATPSDTQKALVNLLLSSDGEKEIVKKRKQVLTEFAKAITGLKTKFNLALGTEVDEADASNWQFSMGQLDDKWSNIETSMTDQGTEIFEQIQEHYRARLLNGIVPAGMSLSQAKVADYGQHKEDLELFKTYLKKLNDHELAKTIRGLYDRYINGDDAKPFLREDFVKALTKEVTAHPNEVSEQLLNRMGQANFMLKQRTKANGAIPVQLQQRELDQIIANQSKYYDWLAKPNPVEKHRASKPYQLDELLTFRIPYYVGPLITPKEQAESRENVFAWMIRKDPSGNITPYNFDEKVDCPASANMFIQRMKNTDTYLIGEDVLPKRSLLYQKYEVLNELNNVSIDGRRLGADQKQRLIREVFERHSSVTIKQVAENLVAHGDFAKRPEIRGLADEKRFLSSLSTYHQLKKILHEAIDDPTKEHDIENIITWSTVFEDAAIFKTELAKISWLDSDTIKALSNIRYRGWGQFSRKLLDGLKLGNGHTVIQELMLSNHNLMQILTDETLKTTMAELNQDKLKADDIEDVINDAYTSPSNKKALRQVLRVVEDIKHAANGQDPSWLYIETADGPGTAGKRTQSRQKQIQTVYANAAQELIDSAVRGELEDKIADKASFTDRLVLYFMQGGRDIYTGAPLNIDQLSHYDIDHILPQSLIKDDSLDNRVLVNATINREKNNVFASTLFASKMAATWRKWHEAGLISGRKLRNLMLRPDEIDKFAHGFVARQLVETRQIIKLTEQIAAAQYPNTKIIAVKAGLSHQLREELDFPKNRDVNHYHHAFDAFLAARIGTYLLKRYPKLAPFFTYGEFAKVDVKKFREFNFIGALTHAKKNIVAKDTGEIVWDKERDIQELDRIYNFKRMLITHEVYFETADLFKQTIYAAKDSKERGGSKQLIPKKQGYPTQVYGGYTRENTAYLAVVKTVEKKADVYRVVRIATSQVAALKEARAQSTVKERELLKKFLTTKFTKIGKNGKKAITPFDIVIPRVPREQLFHNKRYGFFMVNSDTLMHNYQELWMSRSDQQILSKLVKSAKTVENGQVGRLFENIVEQINKYFPLYDINQFRKKLDQSKDIFSKLPLEGNGTTSGKRETIQNILTGAGTGAKNGDLKNLGIKTPFGFLQVPSGIVLDDDTTLIYQSPTGMLNRIVRLSEL

SEQ ID NO: 1042 - protein, 1361 aa, Lactobacillus rhamnosus
MTKLNQPYGIGLDIGSNSIGFAVVDANSHLLRLKGETAIGARLFREGQSAAERRESRTTRRRLSRTRWRLSFLRDFFAPHITKIDPDFFLRQKYSEISPKDKDRFKYEKRLFNDRTDAEFYEDYPSMYHLRLHLMTHTHKADPREIFLAIHHILKSRGHFLTPGAAKDFNTDKVDLEDIFPALTEAYAQVYPDLELTFDLAKADDFKAKLLDEQATPSDTQKALVNLLLSSDGEKEIVKKRKQVLTEFAKAITGLKTKFNLALGTEVDEADASNWQFSMGQLDDKWSNIETSMTDQGTEIFEQIQELYRARLLNGIVPAGMSLSQAKVADYGQHKEDLELFKTYLKKLNDHELAKTIRGLYDRYINGDDAKPFLREDFVKALTKEVTAHPNEVSEQLLNRMGQANFMLKQRTKANGAIPVQLQQRELDQIIANQSKYYDWLAKPNPVEKHRASKPYQLDELLTFRIPYYVGPLITPKEQAESRENVFAWMIRKDPSGNITPYNFDEKVDCPASANMFIQRMKNTDTYLIGEDVLPKRSLLYQKYEVLNELNNVSIDGRRLGADQKQRLIREVFERHSSVTIKQVAENLVAHGDFAKRPEIRGLADEKRFLSSLSTYHQLKKILHEAIDDPTKEHDIENIITWSTVFEDAAIFKTELAKISWLDSDTIKALSNIRYRGWGQFSRKLLDGLKLGNGHTVIQELMLSNHNLMQILTDETLKTTMAELNQDKLKADDIEDVINDAYTSPSNKKALRQVLRVVEDIKHAANGQDPSWLYIETADGPGTAGKRTQSRQKQIQTVYANAAQELIDSAVRGELEDKIADKASFTDRLVLYFMQGGRDIYTGAPLNIDQLSHYDIDHILPQSLIKDDSLDNRVLVNATINREKNNVFASTLFASKMAATWRKWHEAGLISGRKLRNLMLRPDEIDKFAHGFVARQLVETRQIIKLTEQIAAAQYPNTKIIAVKAGLSHQLREELDFPKNRDVNHYHHAFDAFLAARIGTYLLKRYPKLAPFFTYGEFAKVDVKKFREFNFIGALTHAKKNIVAKDTGEIVWDKERDIQELDRIYNFKRMLITHEVYFETADLFKQTIYAAKDSKERGGSKQLIPKKQGYPTQVYGGYTRENTAYLAVVKTVEKKADVYRVVRIATSQVAALKEARAQSTVKERELLKKFLTTKFTKIGKNGKKAITPFDIVIPRVPREQLFHNKRYGFFMVNSDTLMHNYQELWMSRSDQQILSKLVKSAKTVENGQVGRLFENIVEQINKYFPLYDINQFRKKLDQSKDIFSKLPLEGNGTTSGKRETIQNILTGAGTGAKNGDLKNLGIKTPFGFLQVPSGIVLDDDTTLIYQSPTGMLNRIVRLSEL

SEQ ID NO: 1043 - protein, 1352 aa, Lactobacillus ruminis
MNDNFDLMRVKGKKGIGVRLYNEGQSAAERRMHRTARRRYGRRKWRLRLLEDFFDEHMAEVDDTFFARLKDSNISPKDDKKYRKSLLFPKSKGVTYQDDGEFYKKYPTMYHLRYALMTEHRKFDLREIYLAFHHMVKYRGNFLYDTSVDSFEAKNLDIKGKFDEINDLLSSYTDFYVDNSNAALVESILLEKNTTRKDKSKKIAKLLHVEDKEKGKNKKAKDLATQISNAVLGLKCNFHLIFELQQKYSFDLCSEKTEENIAKLSEVLDENQKMLLMILKEVQDQVMLNAFVPSGMSLSEAMMQKYDDYGEQLKIYHELEHSVSDDSAAKLRGAYRDYNDNIIKRIDGDNKKDTFYKRVKNILTKISKEYVDQDVLESCGKLKKLIDENKLFIRQRTAANGVLPHQLHQIEMRKIIDNQKEYYPWLAEPNPNEKRRVYSKYKVEELIAFRIPYYVGPLVDPNNADKNKEARFSWMVRKKDGEITPWNFYDKVDWAESANNFIERMKSKDTYLLGEDVVPKESMLYQKYEVLNELNNLRINDSGLSDSFEDVKLKQAIYNDLFKKQKIVKITDLQNYLVQNHKYLVKPKISGLADENRFLSSLSTYSDLKTIFGDKVDDRTYFNDFEKMVEYSTVFEDGHDYNQKLDEYTWLTKEEKYKIGKKRYRGWGKLSKKLLTGLRDKNNHTIMDNLWETNRNFMQIQTADEFSKQIAEENERHLKGSVSDAINDMYTSPANKKAIRQVLRVVDDIQKAMGYAPSSISLEFAREDGPSVRTVSRANRMKSIYEKYASEVSEEVMKDLDGVIKDKKGLNDRLYLYFEQQGKDMYSGHPLDFDKVISGQEYDIDHILPQAVIKDDSLDNRVLTTKALNNDVKSKGVPCRMFNGMHSFWKNLYDKGFISRRKFNNLTTNPENIDKYKMKGFVNRQLVETRQIIKLVANVLNDKYQNDDVDIIEVRAELTHDVRKHFKFYKNRNVNDYHHAFDAYLTSFIGHYLFKKYPNLRPLFDYNDFMKVSDNVFKQLRGNNFLGEFLNKTGDIISTDGNFVLNKEEMINKLNKAYAFKKILVTKEVGQRTGAMFNETRYPAPNSRKAALKYRRMPKPDSLISVKDYKNTDIYGGYSGKNDAYMVIVDMGKQYMVVGVPVRYTEKLDKLRIKHSELYRDELRKVLSRDKTLLDSKGNVKRFDIVLDRVLYGQLIEDGNELFTLGSSKYKRNFRQLFLDKQCIEILDSSATPQPTDEELIWVYDQILDKVDKYFELYDINRQRETLRKGRAAFCSLPNISMKKDDVTKKKILNEILVALHANESESNCEKIGKKVFGRLQVPGGIKLSKEAKLIYQSPTGLFERVVYLKDL

SEQ ID NO: 1044 - protein, 1339 aa, Lactobacillus salivarius
MERYHIGLDIGTSSIGWAVIGDDFKIKKKKGKNLIGTRLFNEGATAAERRGFRTQRRRLNRRKWRLKLLEEIFDPYMAEVDEYFFARLKSSNLSPKDSNKKYLGSLLFPDKSDSNFYDKYPTIYHLRRDLMEKDEKFDLREIYLAIHHIVKYRGNFLEKVPAKNYKNSGASIGFLLEEVNSLYKDIIGDESIAILNSEKFEDVEKIILDEETRNLDKQKSVGKLLVEDKKKKNIVTAFSKAIFGYKFNIEDLLLIENDEKNKLTFNDENIDDIFNELSHSLDDKQMDLLTKTREIYFKFKLNMIVPTGYTLSESMIEKYEMHKAHLKMYKEFINTLNTKDRKILKNAYSDYINTEKAKAANAQENFYKTVKKIIKDNNSDTAKKIIVLIDEGNFMPKQRTGENGVIPHQLHQIELDRIIENQAKYYPWLAEANPVEKNRKFAKYKLDELVTFRVPYYVGPLIDKTESNKNEKETKFAWMVRKAKGTITPWNFENLVDRTESANRFIKRMTSKDTYIIGEDVLPASSLLYEKFKVLNELNNIKVNEKKLDIEQKQDIYLNLFTTAKNVTKKSLATYLNCSADSISGLSDGEKFNSSLSSYIDLKAILGNIVDDCNKNEDLEKIIEYSTVFEDGNIYKEKLSEISWLTDEQIEKLSNIHFKGWGRLSKKLLTQITNENGERIIDALWNTSNNFMQIINDESIQAKLAEINGKYAGKSDLEDILSEAYTSPQNKKAIRQVMKVVEDIEKAMQCEPTSISIEFTRKKQKSRLTNTRYKKISDVYEKIADEVISEYELRKLQSELDSNANNMRDRYYLYFMQLGRDMYTGEKINIDELHQRYDIDHILPQSFIKDDSINNRVLTRKDVNNKEKSDKTAADLYAVEMSDFWRKLRKQGLITEQKYKNLLTKSDSIDKYAKKGFIKRQLVETSQVVKLVANILQDKYSDTKIIEVRAKLNSNLREEYKLIKNRAVNDYHHAIDGYLTTFIGQYLYKTYPKLRSYFVYNDFKKLDSNYLKHMKKFNFLWQLQDDKTIDIYDNVNNKFVLNVPEMKKYIQKIYNYKYMLVSKEVTTKNGAFYDQTKYNAKTVNLIPIKKNKPTNIYGGYKGKVSSYMMLVKIRKKKEVIYKFVGVPRLWTDELDRLKDTTERKILLNEIAKNSLSKTEQDFEVILDKVYYGQLIIDGNQKYTLGSSEYKYNAMQLHLSKHALEVLAKENVKDAEITDKDLVSVYEEILSVVNKYFELYDINKFRQKLNEGLEIFRKLPVYNVYESNKIKQVGKFEVLNRILMGLHANAMITDLKVLGIKTKLGQMQVNGGIKLSPDAKLIYQSPTGIFSRAVRVKDLG

SEQ ID NO: 1045 - protein, 629 aa, Lactobacillus salivarius
MERYHIGLDIGTSSIGWAVTGDDFKIKRKKGKNLIGTRLFKEGNTAAERRGFRTQRRRLNRRKWRLKLLEEIFDPYMAEVDEYFFARLKDSNLSPKDSNKKYLGSLLFPDISDSNFYDKYPTIYHLRRDLMEKDEKFDLREIYLAIHHIVKYRGNFLENVPAKNYKNSGASIGFLLEEVNNLYKDIVGDENVTILNSEKFEDVEKIILDDGIRNLDKQKGVGKLLVEDKKNKNLVTAFSKAIFGYKFNIEDLLLVEGDEKSKLTFNDENIDDIFNELSHSLDDRRMDLLTKTREIYFKFKLNMIVPTGYTLSESMIEKYEIHKAHLKMYKEFINTLNSKDRKILKNAYTDYINNEKAKAANAQENFYKTVKKTIKDNDSDIVKKIIDLIDEGNFMPKQRTGENGVIPHQLHQIELDRIIENQAKYYPWLAEENPVEKNRKFAKYKLDELVTFRVPYYVGPLVDKTESNKNEKETKFAWMVRKSKGTITPWNFENLVDRTESANRFIKRMTSKDTYIIGEDVLPASSLLYEKFKVLNELNNIKVNEKKLDIEQKQNIYLKLFTTTKNVTKKNLATFLNCSIESISGLSDDKKFNSSLSSYIDLKVILGDIVDDYSKNEDLEKIIEYSTIF

SEQ ID NO: 1046 - protein, 897 aa, Lactobacillus salivarius
  misc_feature (822)..(822): Xaa can be any naturally occurring amino acid
MLIESDEKNKLTFNDENIDDIFNELSHSLDDNQMDLLTKTREIYFKFKLNMIVPTGYTLSESMIEKYEMHKAHLKMYKEFINTLNAKDRKILKNAYSDYINNEKAKAANAQENFYKTIKKTIKDNNSDTAKKIIGLIDEGNFMPKQRTGENGVIPHQLHQIELDRIIENQAKYYPWLAEENPVEKNRKFAKYKLDELVTFRVPYYVGPLVDKTESNKNEKETKFAWMVRKAKGTITPWNFENLVDRTESANRFIKRMTSKDTYIIGEDVLPASSLLYEKFKVLNELNNIKVNKKKLDVEQKQHVYLDLFTTRKNVTKDNLATSLNCDVESITGLSDNEKFNSSLSSYIDLKAILGNAVDDCNKNKDLEKIIEYSTIFEDGNIYKEKLSEISWLTDEQIEKLSNIHFKGWGRLSKKLLTQITNENGERIIDALWNTSNNFIQIISDESIQAKLAEINGEYADKSNLEDILDEAYTSPQNKKAIRQVMKVVEDIEKAMKCKPTSIAIEFTRRKGKSKLTNTRYKKISETYEKITDELISEYELGKLQSKLDSKANNMRDIYYLYFMQLGRDMYTGEKINIDELHQYYDIDHIFPRSFIKDNSLNNRVLTRKEINNNEKADRTAADLYAVKMGDFWRKLRKQGLITEKKYKNLLTRTDSIDKYTKQSFIKRQLVETSQVVKMAANILQDKYSNTKIIEVRARLNSDLRKEYELIKNREVNDYHHAIDGYLTIFIGQYLYKTYPKLRSYFVYDDFKKLDSNYLKHMDKFNFIWKLEDKKAEDVYDNVNNEFILNVPKMKDYIQKIYNYKYMLISKEVTTESGAFYXZTKYNAKTINLIPIKKDKPTNIYGGYKGKVSSYMMLVKIQKKKEVIYKFVGVPRLWTDELDRLIDTDEKKALLKK

SEQ ID NO: 1047 - protein, 1419 aa, Lactobacillus sp.
MAKPQNYTIGLDIGTNSVGWTVTDDQNNILRIKSKKAIGARLFEEGKVAAERRSFRTTRRRLSRRKWRIKLLEELFDEEISKVDPNFFARSHESWISPKDKRERYSAIVFPTPEEDKKFHNEYPTIYHLRDRLMKDDQKHDIREIYVAIHHIMKYRGNFLHDESIETYRSGMSSLGGGDERTILNTKILDDLNDAFADNLATQGISVNSASADQINEIVTSGHLNVDSQKAIAKLLLPTTLSSDDKKQDKKIKKLATDAAKNVASAWLGYKANFAAILNIQEVDKDKKKIYSFALQGADEEDKVETLESVLSQDQIEIVDRIIRIRHAIVLGEIIPVGMTLSEAMIEKYDQHAKDLKNLKTVIRNLKDRKNAVKLQAIYDLYVNNRHADTAKAMKLAGVKKRTELLEPEEFNKSIEKLLDDSPVSAEIKKRIAEKDFLPLQRSNSNGVIPNQLHQIELDEIIKKQSKYYPFLGETNEHASADVARKAPTKLDQLLTFRVPYYVGPLITKEEQEEQDGHSFAWMIRKNPKDHEKITPWNFDEKVDRMASATQFIKRMTTKDTYLLGEDVLPSSSLKYQLFTVLNELNNLRINHKKLTREEKEQVIEDLFKKYKTVKADKFKNYWQKGHAGLDVKIQGMADPEKFNSTMSTYIDLQKIFGDQLDDAQRQNDFEKIIEYSTIFEDRKILGEKLRADFVWLSEDQIKRLCRLRLQGWGRLSLKLLTRLTDADGQNVLERLLNSNDNFMQIVKDPVIKAKIEQKNQKLLRADWSENATESILDEAYTSPQNKKAIRQVMRVVHDIVKACDGNLPAKFAIEFARSQDDDPKRTVARADRLQKIYAQISDEVVSQGVKDQLSGMKSLKDRYYLYFMQGGRDAYTGKPLNIDRLSDYDIDHIMPQSFIKDDSLDNRVLVTRAVNNQKSDNVPVLLYGNHLVADLGITIREMWDRWQKSGMISKRKLANLLTDPATLSEYRAEGFINRQLVETSQVIKLTATILQSEFPDSKIIEVPAKYNSILRKQFDLYKSREVNDYHHAIDAYLSTIVGNYLYQVYPNLRRLFVYGEFKKFSHGEEESSHQAVRRVKSMNFLDDLLRGKHGDDIYCRVTGEVIFSRKDIISKLKQAYSFKQMLVTQEVFTKKSALFDQTVYPSPARDSKTRSGLIPRKQGMDTEIYGGYSGNKDAYFVLAQVVKSKGHTLQVVGVPIRALRALANCSNYSEQLLKIVKAQVLFNKKTGKAKKGISDVRILLDKIPYRQPVLDGSAFYMLGSSTYKYNLKQISLSQQSMKYILDYIDDPNFNKHEMTKIDQQNEKECLLSVYDEILDKMDKYLSLYDINGFRKKLHVGRDKFIKLEVEKQAEAIKNVLRGFHANSDMTKLSDLGLSTSLGFMQASDGIKLSDNAVFIYQSPTGLFERRVKVSDLLK

SEQ ID NO: 1048 - protein, 1289 aa, Lactobacillus versmoldensis
MRRRYRRRRNRLNWLDELFADELAKIDPSFLLRMKNSWVSKKESTRKRDPYNLFIDEKYNDVDYFNQYPTIFHLRKELITEDKKVDIRLIYLAIHNIIKYRGNFTLENQNFDISQLSSNFSQQISDFFALFSDFGVIMPEDFDPDKISDILLNPNLSPSGKVSEAIATISPKTNVKAKIKIILLLLVGNNGDLKKLFDLETTEKIAVKLSSRHIDSELPIILSELNEQQENIITIANSIFGSIILKDFLGDETSISAAKVISFEDHKQDLQKLKTMWRETSNKEAVKAGKKAYEDYIGHEDSETFYKKIKKFLEKAQPVDLANKALAEIELENYLPKQRNRNNTVIPYQLNENELIAILDHQEKYYPFLKENRDKILSLLTFRIPYYVGPLQDSNNNRFSWMTRKASGAIRPWNFSEKVNVEQSSNDFIKRMRSTDTYLIGEPVLPKKSLIYQCYEVLSELNNTRVKDGSSNPKRLDVTIKQRIYNEIFKNQKSVSVKVLQNWLIKESYFKSPEISGLADKKKYLSSLSTYIDFKKIFGQRFVDDPVNSPQLEELAEWLTLFEDKKILLIKLQNSKYSYDQATINKLSTMRYQGTGKLSKKLLVDLKTTKKSIGKSGAESLSILDLMWSTKDNFMQIIHDADYTFEQQIKEFNYDTEDELTPLEKVANLHGSPALKRGLNQSIKVVADIVKFMGHDPEKIFIEFTRSDDFSKLTISRYRRIKKQYLEIAKAIKKIPAEFKDIKEYQTQLEENKGKLASERLMLYFLQCGHSLYSNKPIDLNMINSSKYHVDHILPQSYIKDDSLENKALVLASENENKIDNMLISHDIIATNLPRWQALKDQNLMGSKKFADLTRTTVTENQKKGFIQRQLVQTSQIVKNITLILNDLYKNTSCIETRATLSSEFRKAFSNFDETTYHYQFPEFVKNRDVNDFHHAQDAFLACVIGEYQLKKYPKDNLRLVYDQYSKFLDSLKKDTRKKNGRMPRYTQNGFIIGSMFNGKTYVDDNGEIIWDQKIKESIRKTFNYHQFNVVRQTIEQHGKLFNDTIQPHSDRYKLIPLKTNRDPAIYGGYNNDNNAYSVVLDVDGKKKINGIPIRIANQLKSDELDLSSWLENNIKHKKPMTILIDKVPKYQRIINEETGDLLITSANEVINNVQLFLPSMYTALISLLDSTKTEMYSKLLSNYEANILIDIYDYLLTKLKNNYPLYRKEWAKLAEHRDDFIESDLVTQASTLQQLIKFMHADPSNVNLKFGNFKGNRFGRKNGNIKLSKTDFIYESPTGLFKSIKHID

SEQ ID NO: 1049 - protein, 1372 aa, Legionella pneumophila
MESSQILSPIGIDLGGKFTGVCLSHLEAFAELPNHANTKYSVILIDHNNFQLSQAQRRATRHRVRNKKRNQFVKRVALQLFQHILSRDLNAKEETALCHYLNNRGYTYVDTDLDEYIKDETTINLLKELLPSESEHNFIDWFLQKMQSSEFRKILVSKVEEKKDDKELKNAVKNIKNFITGFEKNSVEGHRHRKVYFENIKSDITKDNQLDSIKKKIPSVCLSNLLGHLSNLQWKNLHRYLAKNPKQFDEQTFGNEFLRMLKNFRHLKGSQESLAVRNLIQQLEQSQDYISILEKTPPEITIPPYEARTNTGMEKDQSLLLNPEKLNNLYPNWRNLIPGIIDAHPFLEKDLEHTKLRDRKRIISPSKQDEKRDSYILQRYLDLNKKIDKFKIKKQLSFLGQGKQLPANLIETQKEMETHFNSSLVSVLIQIASAYNKEREDAAQGIWFDNAFSLCELSNINPPRKQKILPLLVGAILSEDFINNKDKWAKFKNFWNTHKIGRTSLKSKCKEIEEARKNSGNAFKIDYEEALNHPEHSNNKALIKIIQTIPDIIQAIQSHLGHNDSQALIYHNPFSLSQLYTILETKRDGFHKNCVAVTCENYWRSQKTEIDPEISYASRLPADSVRPFDGVLARMMQRLAYEIAMAKWEQIKHIPDNSSLLIPIYLEQNRFEFEESFKKIKGGSSDKTLEQAIEKQNIQWEEKFQRIINASMNICPYKGASIGGQGEIDHIYPRSLSKKHFGVIFNSEANLIYCSSQGNREKKEEHYLLEHLSPLYLKHQFGTDNVSDIKNFISQNVANIKKYISFHLLTPEQQKAARHALFLDYDDEAFKTITKFLMSQQKARVNGTQKFLGKQIMEFLSTLADSKQLQLEFSIKQITAEEVHDHRELLSKQEPKLVKSRQQSFPSHAIDATLTMSIGLKEFPQFSQELDNSWFINHLMPDEVHLNPVRSKEKYNKPNISSTPLFKDSLYAERFIPVWVKGETFAIGFSEKDLFEIKPSNKEKLFTLLKTYSTKNPGESLQELQAKSKAKWLYFPINKTLALEFLHHYFHKEIVTPDDTTVCHFINSLRYYTKKESITVKILKEPMPVLSVKFESSKKNVLGSFKHTIALPATKDWERLFNHPNFLALKANPAPNPKEFNEFIRKYFLSDNNPNSDIPNNGHNIKPQKHKAVRKVFSLPVIPGNAGTMMRIRRKDNKGQPLYQLQTIDDTPSMGIQINEDRLVKQEVLMDAYKTRNLSTIDGINNSEGQAYATFDNWLTLPVSTFKPEIIKLEMKPHSKTRRYIRITQSLADFIKTIDEALMIKPSDSIDDPLNMPNEIVCKNKLFGNELKPRDGKMKIVSTGKIVTYEFESDSTPQWIQTLYVTQLKKQP

SEQ ID NO: 1050 - protein, 907 aa, Leptospira inadai
MAKSIEEIRSIQNEFVVEYSILLKKIKKGEIDKKNDVYKVYQNTIKSSERLEQVLKERLGFQNVSKSYFNNPYSIAQLYNLISVDRSGFSKVCRSCQEENHWRSTLIDTDRGPQAQASKQVSDTGRPFDGQLAMLLDRIAFEIVKLKRIEIERLLSNKNSSKIEVVEIPLLIEENSFNFRYELAELKKLSKKKKDQLKKSVEEFDTKLNSKQERIKAASRELCPYTGKKISKGEIDHILPRSWTQKQFGTALNAEANLIYASREGNQSKGNREYGLNDLDEKYLNIIFGTKEVDSIQRNISDTIDRLDIERGTTRIVFDRLAPNERDCLRHALFIKSLRPKVFELLSGQLKARVNGTQLYLAKRIRSLLLKNQDFITKSLIIKVPSFSFYEPRTVDLPYMRKELAEKFPNLGKQNPQPTGSHIIDAAMVMAYAVETDSGNLSFGSKDKSEGFDSESLSRFLPSNIQFLSIKSKDKTDSKYPYKKPLFKDGVFGERFLPILIAEKGLRVGYTLENSLEVNSENPEEFFNVLKPYLLFKRKPIESNYQTLVAFAQKDKRGYIVLPVNKPKALESISQRKSDPHTSILKNILYTVSRESIPSLIFDKNTLIPEIKSNKVNWGDKLEKKFRIKIEIKLYGKKIADGFIRYPGKTEWEKLLLTEPLKGLVKNKTLTPKWFDSLENLAGLDDHFKDTSNPEAKHKRKSNHYALPVPKGPSGGFRIRRNSFDGYKVYQLYSVDGNSFHAFKIENGWTGKTLLLDIYQNSGNLHSLDYDYENTDISQTALFSKFYKIEFSKEETQKINSKGIKSLYVAPGSSSRQYIRVIFDKQTFSKFIKFQSKFWEFDLITPLPKDKAKDLIESILKIFPEDLRPKKPRNDIHIQNISHDSVQVEYIADGKTQGFGQYFINQN

SEQ ID NO: 1051 - protein, 418 aa, Leptospira inadai
MILKSPIAIDLGAKNTGIVYTTYQPNALPTEIHGATIISDNLKLSQVDRRAKRHQRRNYTRMKLARRLVYLIIRYHYRIPEQDLTPEVKTSLQSLLTRRGYTFQSIETEGNELGQAPWGEIEDYFPNVQDYEKSLPIQTVLYHFFSSENLELNKLVPSKEPETKEDKNILKYIREQKEAFESEQNNGARHRLKYFEEIKEDFPRKIKLMECLQKNKIEEKKFLNLIQNISNLQIKPLRAYFNDKDMKEKEIWEPRRLHTYIARWIRSWHIDPKNSSKRLIRQKLLSQLENGKLKIIRDTSIYSPSKDIISFLEEIDPKDTIPPYEDQNNRHPPRCQNLWLDGKILDRYFPGWEQSLWKLIRNEKNNPFEQLITKDFRTDDTISEGKSLSEQIQIYERSHSNIKLDVRAVILQRFLDRS

SEQ ID NO: 1052 - protein, 125 aa, Leptospira inadai
MSAYDRSANLDPWSLRLQGKAKKEIKTTESLSKTDLQKASDAYEKIKEILSESDTDQFIKLANRYYLEVADIKKGMWLPTAPERKHKEIPKSIAHEENQDISLFHKCNTKTGSKKRISQVSLEMF

SEQ ID NO: 1053 - protein, 1355 aa, Leuconostoc gelidum
MTYSIGLDIGTGSVGWAVIGDDYRLKRAKGKNLIGVRLFDSATTAAERRGYRTTRRRLSRRHWRLRLLNDIFASDLAEQDENFLPRLKYSWVNPDDEQNPQLNSDVANGALFGSSETDKAFHKNYPTIYHLRHELMTDTAKHDLREVYLAIHHIVKYRGNFLNTADKINAENSFNVDLFIAALDEYNEFLETPITSIKDAQLFSDKLTDINARNKSVRVENAMSETYDDKSKIFKAILTALVGNTANFQTIFDLSDLEKDEAKNFKFKLDLEDVETKLDVVRAKLSDEQNAFLEAVLIAYDGITLKMILGDYKSISQSMIESYKSHQRDWKYIKNNVRLNEQKIEPDKNSVKFFKLDPKKLIYPSNLAYLQVISSNEDEHRKGLDYFKTAIQDADILQRIENDTFLPRQRTKRNGVLPYQLHLAELEQIIKKQSKYYPFLANIYTQDNKTENKLIGLLKFRVPYYVGPLVEAEKVTGDGKNHWLIKKELQENTPITPFNFDDVVDKDKSGEQFIKRITGTDSYLIGEPTLPENSLLYQKYNVLQELNNVRNERHQRLPIKVKQDIFEHVFKIDKNVNAKKVMAYLKLNGYGDFQIAGLSDTRTGKFNSNLSSYNYFVDLLGREKTEKIREDRLEEIIEIQTVFEDKILVAKRLSNLDFLTPQEKSKLSAKHYTGWGRLSQKLLTTQFIKTALSEAGDIIPQSHSIIDLLYYTDKNLMEILNDKTFNVRNWLTEQNKGTESGNSLYDQIDALAGPKDIKRGITQVFSIIDDIKKAMGSNPETVYLEFARETQTSRLTNSRLNRVQEIYNSPELKTEFAYLAKKLEAETKESIHDDRLYLYYLQEGRDMYTGKEIPFDQISSNYDIDHIIPQAFTKDDSLDNRVLVNRATNARKSNSPTFTNDIIDNRKSWWQSLVKRGLMSKEKFERLTDKRKTFSENQTNHFIARQLVETRQIIKNVADLIKNNYDGTQAVAIRASLTGEMRRYLDWPKNRDMNDYHHAHDALMMATVGKYVDRRGFFDNGSVSDGAGNAYNLYTKDWLVAARVGTRNDSQRVNPYGFIVGSMNSKAVRQQVNKETGEIVWGNENLDYLRHVLSYKKILVTRRLSGSSGRLYAETLFSPNPKAKLIAQKANRSVALYGGFTKAESAYTALVEFNKKGDRSYKLIKVPMAIANRVNDKQITVTAYIASLNLRDFSRVVLEHLPLGTLIRESDGSEFYAASSEYKHNAKELWAPKEILRSSKKLDKATADNLIDIFDFLTNDKTISNFKFYEKDLLHLKNVRDKFVEASDEIKIKVLSDVIYELHNDAGWRDPFKHIQEKPAWTMLQVKGGIKLSEKAAIVYQSPTGLFETITIVGE

SEQ ID NO: 1054 - protein, 883 aa, Leuconostoc pseudomesenteroides
MIGVRLFEGADTAAERRGYRTTRRRLSRRRWRLRLLNDIFASELSKIDENFLPRLKYSWVNKNDTDNVHFGVGVFDNSEQEKAFYQDYPTIYHLRQKLMTDNRQHDLREVYLAIHHIVKYRGHFLNSGEISANSSFDAQKFLELLREFDNTFYPDAVKFLNLDQLDLPDKISSEISDSKISKSERVDRVLQHVQLANSGAKKILKAILNAVVGNSVDSVAMFSLSDLDKEEKKKINHPVTDSKPFKYSDKEVEAKLDELSNLLQDEQKIEFLSLLKLSFDGLTLKMLLGNAKSVSEAMVERYKVHKDDLKFIKENILNSFSKDKKKEFDKYYEAHLAEKDVDNVDKYFKKIIDDSIISKDKKIELLQKIDDHDFLPSQRSKINGAIPHQLHRNELDKIISQQSKYYPFLADSYTQNGKTETKLAGLVNFRVPYYVGPLVSKENADRNNPDGGQNHWVEFKENTSLSNLTPWNFNEIVDKDKSAAKFIERLTGMDTYLIGEPTLPQNSLLYQKYNVLQELNNIRVDNHKLDVKIKQDVFEHLFKTQNSVSAKDVKNYLIANGYAAPSIQITGLSDTNEKTFNSKLSSYNYLVDKLGRTFVESVKSDVLEKIIELQTVFEDKTVLLRQLSMISELTLAQANQLAEKHWTGWGRLSRKLLSSKVVDVNKITNSTFYPATSRQTIIDTLYHTQLNLMEIINNAEDLYGVRQWISEQNKSDSSDTNDVYDQIQELAGDKKIKRGITQSFRILDDIVKAMGGEPERVYLEFARENQQSGVSFSRKNLLSKLYENDSLKQTFKELKSQLESETKENLQNDRLYLYYLQQGRDMYSNDELNIDQLSSYDIDHIIPQAYTKDNSFDNRVLVSSKANRLKRMLLWYPVKLSKK

SEQ ID NO: 1055 - protein, 468 aa, Leuconostoc pseudomesenteroides
MKDQGFISKRKFENLTRRGDFSEQQKERFIARALVETRQIIVNVSSLIDSHFNHTKAVAVKSNMTTDMRHYTKVPKNRDINDYHHAHDALFVATVGQYIENKGFMKAGKLSDSVGNEYNRYTKKWIETARKNTNYGRVNPFGFVVGSMQTATRGKLDYETGELKVVKNNYWSKDDLDYLLKVVSYKKILVTTKLQDNKGAMYDANLISAKGSGKKKAQLQISKSKNIDLYGGFNKLQNEYSVLILNHDEYRWLSIPMYARNSSEQYLHDKYPDAKVILNHILVGQPILLSNSSDPQKSKFASLRIATGGDYHNNFEFVPSVDVKKILDNIYLNHSVTDDEYKKVFESLLATLHDKFVFGIHQVMYNKIFDNKYLFDKMPDEAKRNVINSLLKFMNISKNQLGAVGKIGGKVNGVLYGFKTETEKGTSAGQLISNGKMQPHDIFIFQSPTGIFERRVTVAELANVIKDE

SEQ ID NO: 1056 - protein, 1103 aa, Listeria innocua
LKLYPGEKSTGMFAQFISLIVGSKGNFQKPFDLIEKSDIECAKDSYEEDLESLLALIGDEYAELFVAAKNAYSAVVLSSIITVAETETNAKLSASMIERFDTHEEDLGELKAFIKLHLPKHYEEIFSNTEKHGYAGYIDGKTKQADFYKYMKTTLENIEGADYFIAKIEKENFLRKQRTFDNGAIPHQLHLEELEAILHQQAKYYPFLKENYDKIKSLVTFRIPYFVGPLANGQSEFAWLTRKADGEIRPWNIEEKVDFGKSAVDFIEKMTNKDTYLPKENVLPKHSLCYQKYLVYNELTKVRYINDQGKTSYFSGQEKEQIFNDLFKQKRKVKKKDLELFLRNMSHVESPTIEGLEDSFNSSYSTYHDLLKVGIKQEILDNPVNTEMLENIVKILTVFEDKRMIKEQLQQFSDVLDGVVLKKLERRHYTGWGRLSAKLLMGIRDKQSHLTILDYLMNDDGLNRNLMQLINDSNLSFKSIIEKEQVTTADKDIQSIVADLAGSPAIKKGILQSLKIVDELVSVMGYPPQTIVVEMARENQTTGKGKNNSRPRYKSLEKAIKEFGSQILKEHPTDNQELKNNRLYLYYLQNGKDMYTGQDLDIHNLSNYDIDHIVPQSFITDNSIDNLVLTSSAGNREKGNDVPPLEIVQKRKVFWEKLYQGNLMSKRKFDYLTKAERGGLTEADKARFIHRQLVETRQITKNVANILHQRFNYGKDDHGNTMKQVRIVTLKSALVSQFRKQFQLYKVRGVNDYHHAHDAYLNGVVANTLLKVYPQLEPEFVYGDYHQFDWFKANKATAKKQFYTNIMLFFAQKDRIIDENGEILWDKKYLDTVKKVMSYRQMNIVKKTEIQKGEFSKATIKPKGNSSKLIPRKTNWDPMKYGGLDSPNMAYAVVIEYAKGKNKLVFEKKIIRVTIMERKAFEKDEKAFLEEQGYRQPKVLAKLPKYTLYECEEGRRRMLASANEAQKGNQQVLPNHLVTLLHHAANCEVSDGKSLDYIESNREMFAELLAHVSEFAKRYTLAEANLNKINQLFEQNKEGDIKAIAQSFVDLMAFNAMGAPASFKFFETTIERKRYNNLKELLNSTIIYQSITGLYESRKRLDD

SEQ ID NO: 1057 - protein, 1337 aa, Listeria innocua
MKNMKKPYTIGLDIGTNSVGWAVLTDQYDLVKRKMKIAGDSEKKQIKKNFWGVRLFDEGQTAADRRMARTARRRIERRRNRISYLQGIFAEEMSKTDANFFCRLSDSFYVDNEKRNSRHPFFATIEEEVEYHKNYPTIYHLREELVNSSEKADLRLVYLALAHIIKYRGNFLIEGALDTQNTSVDGIYKQFIQTYNQVFASGIEDGSLKKLEDNKDVAKILVEKVTRKEKLERILKLYPGEKSAGMFAQFISLIVGSKGNFQKPFDLIEKSDIECAKDSYEEDLESLLALIGDEYAELFVAAKNAYSAVVLSSIITVAETETNAKLSASMIERFDTHEEDLGELKAFIKLHLPKHYEEIFSNTEKHGYAGYIDGKTKQADFYKYMKMTLENIEGADYFIAKIEKENFLRKQRTFDNGAIPHQLHLEELEAILHQQAKYYPFLKENYDKIKSLVTFRIPYFVGPLANGQSEFAWLTRKADGEIRPWNIEEKVDFGKSAVDFIEKMTNKDTYLPKENVLPKHSLCYQKYLVYNELTKVRYINDQGKTSYFSGQEKEQIFNDLFKQKRKVKKKDLELFLRNMSHVESPTIEGLEDSFNSSYSTYHDLLKVGIKQEILDNPVNTEMLENIVKILTVFEDKRMIKEQLQQFSDVLDGVVLKKLERRHYTGWGRLSAKLLMGIRDKQSHLTILDYLMNDDGLNRNLMQLINDSNLSFKSIIEKEQVTTADKDIQSIVADLAGSPAIKKGILQSLKIVDELVSVMGYPPQTIVVEMARENQTTGKGKNNSRPRYKSLEKAIKEFGSQILKEHPTDNQELRNNRLYLYYLQNGKDMYTGQDLDIHNLSNYDIDHIVPQSFITDNSIDNLVLTSSAGNREKGDDVPPLEIVRKRKVFWEKLYQGNLMSKRKFDYLTKAERGGLTEADKARFIHRQLVETRQITKNVANILHQRFNYEKDDHGNTMKQVRIVTLKSALVSQFRKQFQLYKVRDVNDYHHAHDAYLNGVVANTLLKVYPQLEPEFVYGDYHQFDWFKANKATAKKQFYTNIMLFFAQKDRIIDENGEILWDKKYLDTVKKVMSYRQMNIVKKTEIQKGEFSKATIKPKGNSSKLISRKTNWDPMKYGGLDSPNMAYAVVIEYAKGKNKLVFEKKIIRVTIMERKAFEKDEKAFLEEQGYRQPKVLAKLPKYTLYECEEGRRRMLASANEAQKGNQQVLPNHLVTLLHHVANCEVSDGKSLDYIESNREMFAELLAHVSEFAKRYTLAEANLNKINQLFEQNKEGDIKAIAQSFVDLMAFNAMGAPASFKFFETTIERKRYNNLKELLNSTIIYQSITGLYESRKRLDD

SEQ ID NO: 1058 - protein, 953 aa, Listeria ivanovii
MKKMLANIDGADYFIDQIEEENFLRKQRTFDNGTIPHQLHLEELEAILHQQAKYYPFLRKDYEKIRSLVTFRIPYFIGPLANGQSDFAWLTRKADGEIRPWNIEEKVDFGKSAIDFIEKMTNKDTYLPKENVLPKHSLCYQKYMVYNELTKIRYIDDQGKTHHFSGQEKQQIFNGLFKQQRKVKKKDLERFLYTINHIESPTIEGVEDAFNSSFATYHDLQKGGVTQEILDNPLNADMLEEIVKILTVFEDKRMIKEQLQSFSDVLDGTILKKLERRHYTGWGRLSAKLLTGIRDKHSHLTILDYLMNDDGLNRNLMQLINDSNLSFKSIIEKEQVSTADKGIQSIVAELAGSPAIKKGILQSLKIVDELVGIMGYPPQTIVVEMARENQTTGKGKNNSKPRFISLEKAIKEFGSQILKEHPTDNQCLKNDRLYLYYLQNGKDMYTGKELDIHNLSNYDIDHIIPQSFITDNSIDNRVLVSSTANREKGDNVPLLEVVRKRKAFWEKLYQAKLMSKRKFDYLTKAERGGLTEADKANFIQRQLVETRQITKNVANILYQRFNCKQDENGNEVEQVRIVTLKSTLVSQFRKQFQLYKVREVNDYHHAHDAYLNGVVANTLLKVYPQLEPEFVYGDYHQFDWFKANKATAKKQFYTNIMRFFAKENQIIDKNGEILWDNRYLDTIKKVLSYRQMNIVKKTEIQKGEFSNATVNPKGNSSKLISRKADWNPIKYGGFDGSNMAYSIVIEYEKRKKKTVIKKELIQINIMERVAFEKDQKAFLEEKGYYSPKVLTKIPKYTLYECENGRRRMLGSANEAQKGNQMVLPNHLMTLLYHAKNCEANDGESLAYIEMHREMFAELLAYISEFAKRYTLANDRLEKINMFFEQNKKGDIKVIAKSFDKLKVFNAFGAPRDFEFFETTIKRKRYYNIKELLNATIIYQSITGLYEARKRLED

SEQ ID NO: 1059 - protein, 232 aa, Listeria ivanovii
MMSKLILGLDIGISSVGWGVLDESTNEVVDAGVRLFEEATRNGNEDRRGFRSARRLKRRRQHRLERAKGLIENNGFSCTDINKFNPYQARYNAIFGEVTKDELAAALFHLVKRRGTTIDAPEEEVKDVENELSTKMQLEKNAKKLATKYDYICEIQLEKLKENKVVRDHENRFRTEDYVKEARAILENQQEYYPEVTNEFIESYMALIETRRMYYDGPGSEKSPTPYGQYFI

SEQ ID NO: 1060 - protein, 300 aa, Listeria monocytogenes
DDGLNRNLMQLINDSNLSFKSIIEKEQVSTTDKDLQSIVADLAGSPAIKKGILQSLKIVDELVSIMGYPPQTIVVEMARENQTTVKGKNNSRPRYKSLEKAIKEFGSQILKEHPTDNQELRNNRLYLYYLQNGKDMYTGQELDIHNLSNYDIDHIVPQSFITDNSIDNLVLTSSAGNREKGDDVPPLEIVRKRKVFWEKLFQGNLMSKRKFDYLTKAERGGLTEADKATFIHRQLVETRQITKNVANILHQRFNNETDNHGNNMEQVRIVMLKSALVSQFRKQFQLYKVREVNDYHHAHD

SEQ ID NO: 1061 - protein, 782 aa, Listeria monocytogenes
  misc_feature (722)..(722): Xaa can be any naturally occurring amino acid
IFNDLFKQKRKVKKKDLELFLRNINQIESPTIEGLEDSFNASYATYHDLLKVGMKQEILDNPLNTEMLEDIVKILTVFEDKRMIKEQLQQFSDVLDGVVLKKLERRHYTGWGRLSAKLLVGIRDKQSHLTILEYLMNDDGLNRNLMQLINDSNLSFKSIIEKEQVSTTDKDLQSIVADLAGSPAIKKGILQSLKIVDELVSIMGYPPQTIVVEMARENQTTVKGKNNSRPRYKSLEKAIKEFGSQILKEHPTDNQELKNNRLYLYYLQNGKDIYTGQELDIHNLSNYDIDHIVPQSFITDNSIDNLVLTSSAGNREKGDDVPPLEIVRKRKVFWEKLYQGNLMSKRKFDYLTKAERGGLTEADKARFIHRQLVETRQITKNVANILHQRFNNETDNHGNTMEQVRIVTLKSALVSQFRKQFQLYKVREVNDYHHAHDAYLNGVVANTLLKVYPQLEPEFVYGEYHQFDWFKANKATAKKQFYTNIMLFFAQKERIIDENGEILWDKKYLETIKKVLDYRQMNIVKKTEIQKGEFSKATIKPKGNSSKLIPRKENWDPMKYGGLDSPNMAYAVIIEHAKGKKKIVIEKKLIQINIMERKMFEKDEEAFLEEKGYRHPKVLTKLPKYTLYECEKGRRRMLASANEAQKGNQLVLSNHLVSLLYHAKNCEASDGKSLKYTEAHRETFSELLAQVSEFATRYTLADANLSKINNLFEQNKEGDIKXIAQSFVDLMVFNAMGAPASFKFFEATIDRKRYTNLKELLSSTIIYQSITGLYESRKRLDD

SEQ ID NO: 1062 - protein, 1334 aa, Listeria monocytogenes; identical to SEQ ID NO: 109

SEQ ID NO: 1063 - protein, 1334 aa, Listeria monocytogenes
MKNPYTIGLDIGTNSVGWAVLTDQYDLVKRKMKVAGNSDKKQIKKNFWGVRLFDDGQTAVDRRMNRTARRRIERRRNRISYLQEIFAVEMANIDANFFCRLNDSFYVDSEKRNSRHPFFATIEEEVAYHKNYRTIYHLREELVNSSEKADLRLVYLALAHIIKYRGNFLIEGALDTKNTSVDEVYKQFIQTYNQVFMSNIEEGALAKVEENTEVASILAGKFTRREKFERILRLYPGEKSTGMFAQFISLIVGNKGNFQKVFNLVEKTDIECAKDSYEEDLEALLAIIGDEYAELFVAAKNTYNAVVLSSIITVTATETNAKLSASMIERFDAHEKELGELKAFIKLHLPKQYQEIFNNAEIDGYAGYIDGKTKQVDFYKYLKTTLENVEGADYFITKIEEENFLRKQRTFDNGVIPHQLHLEELEAILHQQAKYYPFLREGYDKIKSLVTFRIPYFVGPLANGQSEFAWLTRKDDGEIRPWNIEEKVDFGKSAVDFIEKMTNKDTYLPKENVLPKHSLCYQKYMVYNELTKIRYIDDQGKTNYFSGREKQQIFNDLFKQKRKVKKKDLELFLRNINHIESPTIEGLEDSFNASYATYHDLLKVGLKQEILDNPLNTEILEDIVKILTVFEDKRMIKEQLEQFSDVLDGVVLKKLERRHYTGWGRLSAKLLVGIRDKQSHLTILDYLMNDDGLNRNLMQLINDSNLSFKSIIEKEQVSTTDKDLQSIVADLAGSPAIKKGILQSLKIVDELVSIMGYPPQTIVVEMARENQTTGKGKNNSKPRYKSLEKAIKDFGSQILKEHPTDNQELKNNRLYLYYLQNGKDIYTGQELDIHNLSNYDIDHIVPQSFITDNSIDNLVLTSSAGNREKGGDVPPLEIVRKRKVFWEKLYQGNLMSKRKFDYLTKAERGGLTEADKARFIHRQLVETRQITKNVANILHQRFNKETDNHGNTMEQVRIVTLKSALVSQFRKQFQLYKVREVNDYHHAHDAYLNGVVANTLLKVYPQLEPEFVYGEYHQFDWFKANKATAKKQFYTNIMLFFAQKERIIDENGEILWDKKYLETIKKVLDYRQINIVKKTEIQKGEFSKATIKPKGNSSKLIPRKENWDPMKYGGLDSPNMAYAVIIEHAKGKKKIVIEKKLIQINIMERKMFEKDEEAFLEEKGYHQPKVLTKLPKYTLYECEKGRRRMLSSANEAQKGNQLVLSNHLVSLLYHAKNCEASDGKSLKYIEAHRETFSELLAQVSEFATKYTLADANLSKINNLFEQNKEGDIKAIAQSFVDLMAFNAMGAPASFKFFEATIDRKRYTNLKELLSSTIIYQSITGLYESRKRLDD

SEQ ID NO: 1064 - protein, 1334 aa, Listeria monocytogenes
MKNPYTIGLDIGTNSVGWAVLTDQYDLVKRKMKVAGNSDKKQIKKNFWGVRLFDDGQTAVDRRMNRTARRRIERRRNRISYLQEIFAVEMANIDANFFCRLNDSFYVDSEKRNSRHPFFATIEEEVAYHKNYRTIYHLREELVNSSEKADLRLVYLALAHIIKYRGNFLIEGALDTKNTSVDEVYKQFIQTYNQVFMSNIEEGALAKVEENTEVASILAGKFTRREKFERILRLYPGEKSTGMFAQFISLIVGNKGNFQKVFNLVEKTDIECAKDSYEEDLEALLAIIGDEYAELFVAAKNTYNAVVLSSIITVTATETNAKLSASMIERFDAHEKELGELKAFIKLHLPKQYQEIFNNAEIDGYAGYIDGKTKQVDFYKYLKTTLENVEGADYFITKIEEENFLRKQRTFDNGVIPHQLHLEELEAILHQQAKYYPFLREGYDKIKSLVTFRIPYFVGPLANGQSEFAWLTRKDDGEIRPWNIEEKVDFGKSAVDFIEKMTNKDTYLPKENVLPKHSLCYQKYMVYNELTKIRYIDDQGKTNYFSGREKQQIFNDLFKQKRKVKKKDLELFLRNINHIESPTIEGLEDSFNASYATYHDLLKVGLKQEILDNPLNTEILEDIVKILTVFEDKRMIKEQLEQFSDVLDGVVLKKLERRHYTGWGRLSAKLLVGIRDKQSHLTILDYLMNDDGLNRNLMQLINDSNLSFKSIIEKEQVSTTDKDLQSIVADLAGSPAIKKGILQSLKIVDELVSIMGYPPQTIVVEMARENQTTGKGKNNSKPRYKSLEKAIKDFGSQILKEHPTDNQELKNNRLYLYYLQNGKDIYTGQELDIHNLSNYDIDHIVPQSFITDNSIDNLVLTSSAGNREKGGDVPPLEIVRKRKVFWEKLYQGNLMSKRKFDYLTKAERGGLTEADKARFIHRQLVETRQITKNVANILHQRFNKETDNHGNTMEQVRIVTLKSALVSQFRKQFQLYKVREVNDYHHAHDAYLNGVVANTLLKVYPQLEPEFVYGEYHQFDWFKANKATAKKQFYTNIMLFFAQKERIIDENGEILWDKKYLETIKKVLDYRQINIVKKTEIQKGEFSKATIKPKGNSSKLIPRKENWDPVKYGGLDSPNMAYAVIIEHAKGKKKIVIEKKLIQINIMERKMFEKDEEAFLEEKGYHQPKVLTKLPKYTLYECEKGRRRMLSSANEAQKGNQLVLSNHLVSLLYHAKNCEASDGKSLKYIEAHRETFSELLAQVSEFATKYTLADANLSKINNLFEQNKEGDIKAIAQSFVDLMAFNAMGAPASFKFFEATIDRKRYTNLKELLSSTIIYQSITGLYESRKRLDD

SEQ ID NO: 1065 - protein, 1099 aa, Listeria monocytogenes
MKNPYTIGLDIGTNSVGWAVLTDQYDLVKRKMKVAGNSDKKQIKKNFWGVRLFDDGQTAVDRRMNRTARRRIERRRNRISYLQEIFAVEMANIDANFFCRLNDSFYVDSEKRNSRHPFFATIEEEVAYHKNYRTIYHLREELVNSSEKADLRLVYLALAHIIKYRGNFLIEGALDTKNTSVDEVYKQFIQTYNQVFMSNIEEGALAKVEENTEVASILAGKFTRREKFERILRLYPGEKSTGMFAQFISLIVGNKGNFQKVFNLVEKTDIECAKDSYEEDLEALLAIIGDEYAELFVAAKNTYNAVVLSSIITVTATETNAKLSASMIERFDAHEKELGELKAFIKLHLPKQYQEIFNNAEIDGYAGYIDGKTKQVDFYKYLKTTLENVEGADYFITKIEEENFLRKQRTFDNGVIPHQLHLEELEAILHQQAKYYPFLREGYDKIKSLVTFRIPYFVGPLANGQSEFAWLTRKDDGEIRPWNIEEKVDFGKSAVDFIEKMTNKDTYLPKENVLPKHSLCYQKYMVYNELTKIRYIDDQGKTNYFSGREKQQIFNDLFKQKRKVKKKDLELFLRNINHIESPTIEGLEDSFNASYATYHDLLKVGLKQEILDNPLNTEILEDIVKILTVFEDKRMIKEQLEQFSDVLDGVVLKKLERRHYTGWGRLSAKLLVGIRDKQSHLTILDYLMNDDGLNRNLMQLINDSNLSFKSIIEKEQVSTTDKDLQSIVADLAGSPAIKKGILQSLKIVDELVSIMGYPPQTIVVEMARENQTTGKGKNNSKPRYKSLEKAIKDFGSQILKEHPTDNQELKNNRLYLYYLQNGKDIYTGQELDIHNLSNYDIDHIVPQSFITDNSIDNLVLTSSAGNREKGGDVPPLEIVRKRKVFWEKLYQGNLMSKRKFDYLTKAERGGLTEADKARFIHRQLVETRQITKNVANILHQRFNKETDNHGNTMEQVRIVTLKSALVSQFRKQFQLYKVREVNDYHHAHDAYLNGVVANTLLKVYPQLEPEFVYGEYHQFDWFKANKATAKKQFYTNIMLFFAQKERIIDENGEILWDKKYLETIKKVLDYRQINIVKKTEIQKGEFSKATIKPKGIPAN

SEQ ID NO: 1066 - protein, 1334 aa, Listeria monocytogenes
MKNPYTIGLDIGTNSVGWAVLTDQYDLVKRKMKVAGNSDKKQIKKNFWGVRLFDEGETAADRRMNRTARRRIERRRNRISYLQEIFALEMANIDANFFCRLNDSFYVDSEKRNSRHPFFATIEEEVAYHKNYRTIYHLREELVNSSEKADLRLVYLALAHIIKYRGNFLIEGALDTKNTSVDGVYKQFIQTYNQVFISNIEEGTLAKMEENTTVADILAGKFTRKEKLERILQLYPGEKSTGMFAQFISLIVGSKGNFQKVFDLVEKTDIECAKDSYEEDLEALLAIIGDEYAELFVAAKNTYNAVVLSSIITVTDTETNAKLSASMIERFDAHEKDLSELKAFIKLHLPKQYEEIFSNVAIDGYAGYIDGKTKQVDFYKYLKTLLENIEGADYFIAKIEEENFLRKQRTFDNGAIPHQLHLEELEAILHQQAKYYPFLKEAYDKIKSLVTFRIPYFVGPLANGQSDFAWLTRKADGEIRPWNIEEKVDFGKSAVDFIEKMTNKDTYLPKENVLPKHSLYYQKYMVYNELTKVRYIDDQGKTNYFSGQEKQQIFNDYFKQKRKVSKKDLEQFLRNMSHIESPTIEGLEDSFNSSYATYHDLLKVGIKQEVLENPLNTEMLEDIVKILTVFEDKRMIKEQLQQFSDVLDGAVLKKLERRHYTGWGRLSAKLLVGIRDKQSHLTILDYLMNDDGLNRNLMQLINDSNLSFKSIIEKEQVSTTDKDLQSIVADLAGSPAIKKGILQSLKIVDELVSIMGYPPQTIVVEMARENQTTVKGKNNSRPRYKSLEKAIKEFGSQILKEHPTDNQELRNNRLYLYYLQNGKDMYTGQELDIHNLSNYDIDHIVPQSFITDNSIDNLVLTSSAGNREKGDDVPPLEIVRKRKVFWEKLFQGNLMSKRKFDYLTKAERGGLTEADKATFIHRQLVETRQITKNVANILHQRFNNETDNHGNNMEQVRIVMLKSALVSQFRKQFQLYKVREVNDYHHAHDAYLNGVVANTLLKVYPQLEPEFVYGEYHQFDWFKANKATAKKQFYTNIMLFFAQKERIIDENGEILWDKKYLETIKKVLDYRQMNIVKKTEIQKGEFSKATIKPKGNSSKLIPRKENWDPMKYGGLDSPNMAYAVIIEHAKGKKKVVFEKKIIRITIMERKAFEKDEKSFLEKQGYRQPKVLTKLPKYTLYECENGRRRMLASANEAQKGNQQVLKGQLITLLHHAKNCEASDGKSLDYIESNREMFGELLAHVSEFAKRYTLADANLSKINQLFEQNKDNDIKVIAQSFVNLMAFNAMGAPASFKFFEATIERKRYTNLKELLSATIIYQSITGLYEARKRLDG

SEQ ID NO: 1067 - protein, 1334 aa, Listeria monocytogenes
MKNPYTIGLDIGTNSVGWAVLTNQYDLVKRKMKVAGNSDKKQIKKNFWGVRLFDDGQTAVDRRMNRTARRRIERRRNRISYLQEIFAVEMANIDANFFCRLNDSFYVDSEKRNSRHPFFATIEEEVAYHKNYRTIYHLREELVNSSEKADLRLVYLALAHIIKYRGNFLIEGALDTKNTSVDGVYEQFIQTYNQVFMSNIEEGTLAKVEENIEVANILAGKFTRREKFERILQLYPGEKSTGMFAQFISLIVGSKGNFQKVFDLIEKTDIECAKDSYEEDLEALLAIIGDEYAELFVAAKNTYNAVVLSSIITVTATETNAKLSASMIERFDAHEKDLGELKAFIKLHLPKQYQEIFNNAAIDGYAGYIDGKTKQVDFYKYLKTILENIEGADYFIAKIEEENFLRKQRTFDNGAIPHQLHLEELEAIIHQQAKYYPFLREDYEKIKSLVTFRIPYFVGPLAKGQSEFAWLTRKADGEIRPWNIEEKVDFGKSAVDFIEKMTNKDTYLPKENVLPKHSLCYQKYMVYNELTKVRYIDDQGKTNYFSGQEKQQIFNDLFKQKRKVKKKDLELFLRNINHIESPTIEGLEDSFNASYATYHDLLKVGMKQEILDNPLNTEMLEDIVKILTVFEDKPMIKEQLQQFSDVLDGGVLKKLERRHYTGWGRLSAKLLVGIREKQSHLTILDYLMNDDGLNRNLMQLINDSNLSFKSIIEKEQVSTTDKDLQSIVADLAGSPAIKKGILQSLKIVDELVSIMGYPPQTIVVEMARENQTTGKGKNNSKPRYKSLEKAIKEFGSKILKEHPTDNQELKNNRLYLYYLQNGKDMYTGQELDIHNLSNYDIDHIVPQSFITDNSIDNLVLTSSAGNREKGGDVPPLEIVRKRKVFWEKLYQGNLMSKRKFDYLTKAERGGLTDADKARFIHRQLVETRQITKNVANILHQRFNNETDNHGNTMEQVRIVTLKSALVSQFRKQFQLYKVREVNDYHHAHDAYLNGVVANTLLKVYPQLEPEFVYGEYHQFDWFKANKATAKKQFYTNIMLFFGQKERIIDENGEILWDKKYLETIKKVLDYRQMNIVKKTEIQKGEFSKATIKPKGNSSKLIPRKENWDPMKYGGLDSPNMAYAVIIEHAKGKKKLIFEKKIIRITIMERKMFEKDEEAFLEEKGYRHPKVLTKLPKYTLYECEKGRRRMLASANEAQKGNQLVLSNHLVSLLYHAKNCEASDGKSLKYIEAHRETFSELLAQVSEFATRYTLADANLSKINNLFEQNKEGDIQAIAQSFVDLMAFNAMGAPASFKFFEATIDRKRYTNLKELLSSTIIYQSITGLYESRKRLDD

SEQ ID NO: 1068 - protein, 874 aa, Listeria seeligeri; identical to SEQ ID NO: 175

SEQ ID NO: 1069 - protein, 1087 aa, Listeriaceae bacterium
MKKLVLGLDIGVASVGWGIIDAENGDVVDTGVRLFSSRDASENESRRTSRQSRRLSRRKKHRRERIKQLLLAHDMDICDIVNENPYELRVKGLNEKLEVSEIYVALTHLAKRRGVSYLDDVVEEGGTIKSEHLNKNMEEIKSGKMPCEIQLERFEKYGQVRGMIEINQDTEESSFLVNIFRTSDYIKEAKTILATQQKFHKQITNEFIDEYIHIMASKRDYFIGPGNEKSRTDYGVYRTNGDTWDNLFEILIGKCSVFPEETRAARSSYVAQEFNLLNDLNNLKISNLESGKLSASQKHDIVEKVKNSKKFGTKDLLKYIASVCECKIEDIGGCRVDKNRKPIMHTFENYRKVHNALNEAGVDLRLSETDYDELMKIMTLNSETLEIKKQCKEKLPQLTEDYLNVCLVLNKKGAFSGWHALSLKAMKLMMPELYGTSKNQMQIIHTMQLGKAYLKPLNQQKYLNSEAILEEIYNPIAARSIRQTIKVTNAILKKYGHLDSVIIEMPRDYQTSEDERKMIEKMQKENEKEKKAALKRAREEYPFPDEAFRNHKELATKLRLWYQQDQFCVYSGRKISVVDLVRNPNQFEIDHIIPQSVSLDDSLNNKVLCFSEENQKKGQQTPFYYHKGKSGNWTYEQYKLFVEKLFDKKKISNKKRELLLFEEDINKWDVRRGFIARNLVDTRYASRVILNSYQQYFGNHEMGTKVKVVRGKFTSQLRKKWRIFKDRNESHSHHAIDALIVAATANLRLWKKNTLGVSDEGKVYDKETGEILPFEKLTESEYNEMMNKEPYLNFKTKLQNIETKVKYSYRVSKKVNRKISDATIYSTRERDGIDYIVGKIKNIYDVKTYKDQFLKRYKKNKEQFLMYQHDPQTFAILENIMATYQDAENPFLAYKKEYGVIRKYSKKGGGSPVTSLKFIDKVLGQKIDLTAKNQAALPKNKKVVLQSITPYRADVYYDEIDKRYHLIGVKYSLFSFSKQGYVINPIAYQKLLEKEQIHSEMKFCFSLYREDIIEFGEDPDSLTRYRFWSKNESGKNKIEVKPIEKPNFEKQTVLTITKKIKILNKYQTDVLGNSFKAQEEKDPRNIE

SEQ ID NO: 1070 - protein, 1345 aa, Marinilabilia sp.
MKKILGLDLGTTSIGWAFIKEPEKDVVGSEIVDMGVRIVALSSDEENDFAKGNTISINADRTLKRGARRNLQRFKLRRDALLEIFKEMKLIPSNFKYAEDGPSSTFSTLKLRDKAAKEKIELDDLVKVLLQINKKRGYRSSRKAKSEEDDGSAIDSMGIAKELYENDLTPGQWVFEALQKGRKNVPDFYRSDLQEEFKKIVNYQSEFYPDVLNSSFVEDWMGKASTPTKQYFNKKGVHLAENKGKREERRLQEYNWRAVAVNSKIDLSEIALILSQINSQISNSSGYLGAISDRSKELYFKNQTVGQYLYQQIKINPHTRLKGQVFYRQDYLDEFEKIWSVQSGFHPQLNDALKKEIRDITIFFQRRLKSQKHLISNCEFEDYHKVVPKSHPIFQEFRIWQNLNNLTLIKKDNLNEKSELALEDKIALANELAFKREQSVKDALNILGLKSSEWEFNFTKIEGNRTNHAFFEAFAKIIEIEDGEPLDLGNLKADDILDQFSEAFLRIGIDPGLLQVNNDIEGPNYEKQPYIQFWHLLYSSEDDQKLKQNLIKKFGFKPDHAKILASISLQDDHASLSSRAIKKILPHLQSGLIYDKACTYAGYNHSSSFTKEENEKRELSSELDLLKKNSLRNPVVEKILNQMINVVNAILKDPNLGKPDEIRVEMARELKANAEQRKNMTSNIASATRDHEKYREILKKEFGLKRVTKNDLLRYKLWLETDGISLYTGKPIEASKLFSKEYDIEHIIPKTRLFDDSFSNKTICERQLNIDKANVTAFSFLQNKLSGDEFEQYQSRVKSLFGKLSKAKIQKLLMANDKIPEDFIARQLQETRYISKKAKEILFEITRRVSVTTGTITDKLREDWGLVEIMKELNWEKYDKLGLTYTIEGKHGERLNKIKDWSKRNDHRHHAMDALTVALTKPAYIQYLNNLNAKELNGKKSTEIFAIEQKYLKRENGKLCFIPPVENIRTEAKKHLSKVLISYKAKNKVVTINKNRTNKKAGFNEQIALTPRGQLHKETVYGKAFHYSTKFEKIGASFDVQKINAVAKKEEREALLKRLAENGDDPKKAFTGKNSLSKMPIYLDLKRNIKLPEKVKTVVLEQNYTIRKNIDPDLKLDKVIDVGVKRILENRLKEFGGNAKLALSNLDENPIWLNKEKGITIKRVKISGVSNVESLHVKKDHFGEPILDQVGNEIPVDFVSTGNNHHVAIYEDEKGNLQEEVVSFFEAVVRQNQGLPIINKNHSLGWKFLFTLKQNEYFVFPSDDFDPTDVDLMDEENYHLISPNLFRVQKFTTKDYFFRHHLETTVEDKSELKGVSFKRLGLPGLNCIKKIRINHLGKIIQVGEY

SEQ ID NO: 1071 - protein, 1091 aa, Mobiluncus mulieris
MDSRKYRVGIDVGTNSVGFAAVEEDDSGSPTRFLNTMVVIHDSGVDSEQKKYAITRLASAGTARRTRRLYRTRRQRLRELDDFISNELGYPLVNLENFADPYEPWKVRADLATTKLPNDELPEAMSIALRHMARHRGWRSPYQRVEALHLHAEISKEFAALKERVVEKTGDVFSDDATPAEVLVDLMGRQKVRGADGVLSGKLRQSDNANELRKIASVQGIDDETLNRIIDRVFSSKSPKGKASERVGMDALPGQGSKPRALKAMPSFQKFRVVSVICNLRIKDSGGDARPLSMEEKEKLIDYLMSSTTDDHVTWTDVADLLHVKRSQLQGTAKEGFDGERPYTRPPVNSTWSKIKDSKIKSLVALWKTGDVDVQSAIVEALSNASVLEDSRPGADIVVAYLESLDDKELESLDKVGLPAGRASYSEDSLERLTERMLRDDCDLFEARKREFNVADDWKPPADPIYAPVGNPGVDRVLKIVNRLLMAAEREWGAPTQINIEHVRSGFSSELMQREFERENERRRAQNEEAVKAILTEKGGNSRVSKYDITRYYAVKRQHCQCLYCGTPITFSDCELDHIVPRKGVGSTNTRVNLAAACRSCNRDKSNLPFAVWAGKASNFDVSIDDAVSRVKQWQRSQNEGVREFRAFQNEVISRLLKTTEDPEIDSRSLESVAWMARELHHRVEYYFQSKGAQTQVSVYRGAVTAQARKSSGLEDKVKMIGGGGKTRLDRRHHAMDAATIALMTPGISTTLSEKNNLRDAQKFTGQSETWKDYCGRTETARKHFAVWKSNMERLTDLFNDKLENDAIPVVQPLRLRLSNSKAHDDGIGKLDSKKLGSVWSLADIDRAATPQIWTALTRCDDFDPTKGLPENANRVIRAQGVKYESEDNIPVFPSNVAAIAVRDGYAEIGSTIHHARIYRIDDGKKTFYSMIRVFAVDLLKHQAEDLFTVKLPPSAISIRTCEDSLRRALSNGTAEYLGWLVPGDEIIVDTSDKAFHTGQIGDLLRNFPVNSFRLTGFPSNSRLRLKPVLLAGEGLRDDAEDSIKKILLGQGWRPAINVLFSKGKPRIVRRNSLGIERPSSNNGLPFSWEA

SEQ ID NO: 1072 - protein, 1233 aa, Mycoplasma canis
MEKKRKVTLGFDLGIASIGWAIVDSETNQVYKLGSRLFDAPDTNLERRTQRGTRRLLRRRKYRNQKFYNLVKRTEVFGLSSREAIENRFRELSIKYPNIIELKTKALSQEVCPDEIAWILHDYLKNRGYFYDEKETKEDFDQQTVESMPSYKLNEFYKKYGYFKGALSQPTESEMKDNKDLKEAFFFDFSNKEWLKEINYFFNVQKNILSETFIEEFKKIFSFTRDISKGPGSDNMPSPYGIFGEFGDNGQGGRYEHIWDKNIGKCSIFTNEQRAPKYLPSALIFNFLNELANIRLYSTDKKNIQPLWKLSSIDKLNILLNLFNLPISEKKKKLTNANINDIVKKESTKSIMLSVEDIDMIKDEWAGKEPNVYGVGLSGLNIEESAKENKFKFQDLKILNVLINLLDNVGIKFEFKDRNDIIKNLELLDNLYLFLIYQKESNNKDSSIDLFIAKNELLNIENLKLKLKEFLLGAGNEFENHNSKTHSLSKKAIDAILPKLLDNNEGWNLEAIKNYDEEIKSQIEDNSSLMAKQDKKYLNDNFLKDAILPPNVKVTFQQAILIFNKIIQKFSKDFEIDKVVIELAREMTQDQENDALKGIAKAQKSKKSLVEERLEANNIDKSVFNDKYEKLIYKIFLWISQDFKDPYTGAQISTNEIVNNKVEIDHIIPYSLCFDDSSANKVLVHKQSNQEKSNSLPYEYIKQGHSGWNWDEFTKYVKRVFVNNVDSILSKKERLKKSENLLTTSYDGYDKLGFLARNLNDTRYATILFRDQLNNYAEHHLIDNKKMFKVIAMNGAVTSFIRKNMSYDNKLRLKDRSDFSHHAYDAAIIALFSNKTKTLYNLIDPSLNGIISKRSEGYWVIEDRYTGEIKELKKEDWTSIKNNVQARKIAKEIEEYLIDLDDEVFFSRKTKRKTNRQLYNETIYGIAAKTDEDGITNYYKKEKFSILDDKDIYLRLLREREKFVINQSNPEVIDQIIEIIESYGKENNIPSRDEAINIKYTKNKINYNLYLKQYMRSLTKSLDQFSEEFINQMIANKTFVLYNPTKNTTRKIKFLRLVNDVKINDIRKNQVINKFNGKNNEPKAFYENINSLGAIVFKNSANNFKTLSINTQIAIFGDKNWDIEDFKTYNMEKIEKYKEIYGIDKTYNFHSFIFPGTILLDKQNKEFYYISSIQTVRDIIEIKFLNKIEFKDENKNPDTSKTPKRLMFGIKSIMNNYEQVDISPFGINKKIFE

SEQ ID NO: 1073 - protein, 1233 aa, Mycoplasma canis
MEKKRKVTLGFDLGIASVGWAIVDSETNQVYKLGSRLFDAPDTNLERRTQRGTRRLLRRRKYRNQKFYNLVKRTEVFGLSSREAIENRFRELSIKYPNIIELKTKALSQEVCPDEIAWILHDYLKNRGYFYDEKETKEDFDQQTIESMPSYKLNEFYKKYGYFKGALSQPTESEMKDNKDLKEAFFFDFSNKEWLKEINYFFNVQKNILSETFIEEFKKIFSFTRDISKGPGSDNMPSPYGIFGEFGDNGQGGRYEHIWDKNIGKCSIFTNEQRAPKYLPSALIFNFLNELANIRLYSTDKKNIQPLWKLSSIDKLNILLNLFNLPISEKKKKLTSANINDIVKKESTKSIMLSVEDIDMIKDEWAGKEPNVYGVGLSGLNIEESAKENKFKFQDLKILNVLINLLDNVGIKFEFKDRNDIIKNLELLDNLYLFLIYQKESNNKDSSIDLFIAKNESLNIENLKLKLKEFLLGAGNEFENHNSKTHSLSKKAIDAILPKLLDNNEGWNLEAIKNYDEEIKSQIEDNSFLMAKQDKKYLNDNFLKDAILPPNVKVTFQQAILIFNKIIQKFSKDFEIDKVVIELAREMTQDQENDALKGIAKAQKSKKSLVEERLEANNIDKSVFNEKYEKLIYKIFLWISQDFKDPYTGAKISANEIVDNKVEIDHIIPYSLCFDDSSANKVLVHKQSNQEKSNSLPYEYIKQGHSGWNWDEFTKYVKRVFVNNVDSILSKKERLKKSENLLTTSYDGYDKLGFLARNLNDTRYATILFRDQLNNYAEHHLIDDKKMFKVIAMNGAVTSFIRKNMSYDNKLRLKNRNDFSHHAYDAAIIALFSNKTKTLYNLIDPSLNGIISKRSEGYWVIEDRYTGEIKELKKEDWTSIKNNVQARKIAKEIEEYLIDLDDEVFFSRKTKRKTNRQLYNETIYGIAAKTDEDGITNYYKKEKLSILDDKDIYLRLLREREKFVINQSNPEVIDQIIEIIESYGKENNIPSRDEAINIKYTKNKINYNLYLKQYMRSLTKSLDQFSEEFINQMIANKTFVLYNPTKNTTRKIKFLRLVNDVKINDIRKNQVINKFNGKNNEPKAFYENINSLGAIVFKNSANNFKTLSINTQIAIFGDKNWDIEDFKTYNMEKIEKYKEIYGIDKTYNFHSFIFPGTILLDKQNKEFYYISSIQTVRDIIEIKFLNKIEFKDENKNQDTSKTPKRLMFGIKSIMNNYEQVDISPFGINKKIFE

SEQ ID NO: 1074 - protein, 1233 aa, Mycoplasma canis; identical to SEQ ID NO: 242

SEQ ID NO: 1075 - protein, 1233 aa, Mycoplasma canis
MEKKRKVTLGFDLGIASVGWAIVDSETNQVYKLGSRLFDAPDTNLERRTQRGTRRLLRRRKYRNQKFYNLVKRTEVFGLSSREAIENRFRELSIKYPNIIELKTKALSQEVCPDEIAWILHDYLKNRGYFYDEKETKEDFDQQTVESMPSYKLNEFYKKYGYFKGALSQPTESEMKDNKDLKEAFFFDFSNKEWLKEINYFFNVQKNILSETFIEEFKKIFSFTRDISKGPGSDNMPSPYGIFGEFGDNGQGGRYEHIWDKNIGKCSIFTNEQRAPKYLPSALIFNFLNELANIRLYSTDKKNIQPLWKLSSVDKLNILLNLFNLPISEKKKKLTSTNINDIVKKESIKSIMISVEDIDMIKDEWAGKEPNVYGVGLSGLNIEENAKENKFKFQDLKILNVLINLLDNVGIKFEFKDRNDIIKNLELLDNLYLFLIYQKESNNKDSSIDLFIAKNKSLNIENLKLKLKEFLLGAGNEFENHNSKSHSLSKKAIDAILPKLLDNNEGWNLEAIKNYDEEIKSQIEDNSSLMAKQDKKYLNDNFLKDAILPPNVKVTFQQAILIFNKIIQKFSKDFEIDKVVIELAREMTQDQENDALKGMAKAQKSKKSLVEERLEANNIDKSVFNDKYEKLIYKIFLWISQDFKDPYTGAQISVNEIVNNKVEIDHIIPYSLCFDDSSANKVLVHKQSNQEKSNSLPYEYIKQGHSGWNWDEFTKYVKRVFVNNVDSILSKKERLKKSENLLTTSYDGYDKLGFLARNLNDTRYATILFRDQLNNYAEHHLIDNKKMFKVIAMNGAVTSFIRKNMSYDNKLRLKDRSDFSHHAYDAAIIALFSNKTKTLYNLIDPSLNGIISKRSEGYWVIEDRYTGEIKELKKEDWTSIKNNVQARKIAKEIEEYLIDLDDEVFFSRKTKRKTNRQLYNETIYGIAAKTDEDGITNYYKKEKFSILDDKDIYLRLLREREKFVINQSNPEVIDQIIEIIESYGKENNIPSRDEAINIKYTKNKINYNLYLKQYMRSLTKSLDKFSEEFINQMIANKTFVLYNPTKNTTRKIKFLRLVNDVKINDIRKNQVINKFNGKNNEPKAFYENINSLGAIVFKNSANNFKTLSINTQIAIFGDKNWDIEDFKTYNMEKIEKYKEIYGIDKTYNFHSFIFPGTILLDKQNKEFYYISSIQTVRDIIEIKFLNKIEFKDENKNQDTSKTPKRLMFGIKSIMNNYEQVDISPFGINKKIFE

SEQ ID NO: 1076 - protein, 1233 aa, Mycoplasma canis
MEKKRKVTLGFDLGIASVGWAIVDSETNQVYKLGSRLFDAPDTNLERRTQRGTRRLLRRRKYRNQKFYNLVKRTEVFGLSSREAIENRFRELSIKYPNIIELKTKALSQEVCPDEIAWILHDYLKNRGYFYDEKETKEDFDQQTVESMPSYKLNEFYKKYGYFKGALSQPTESEMKDNKDLKEAFFFDFSNKEWLKEINYFFNVQKNILSETFIEEFKKIFSFTRDISKGPGSDNMPSPYGIFGEFGDNGQGGRYEHIWDKNIGKCSIFTNEQRAPKYLPSALIFNFLNELANIRLYSTDKKNIQPLWKLSSVDKLNILLNLFNLPISEKKKKLTSTNINDIVKKESIKSIMLSVEDIDMIKYEWAGKEPNVYGVGLSGLNIEESAKENKFKFQDLKILNVLINLLDNVGIKFEFKDRNDIIKNLELLDNLYLFLIYQKESNNKDSSIDLFIAKNKSLNIENLKLKLKEFLLGAGNEFENHNSKTHSLSKKAIDAILPKLLDNNEGWNLEAIKNYDEEIKSQIEDNSSLMAKQDKKYLNDNFLKDAILPPNVKVTFQQAILIFNKIIQKFSKDFEIDKVVIELAREMTQDQENDALKGIAKAQKSKKSLVEERLEANNIDKSVFDDKYEKLIYKIFLWISQDFKDPYTGAKISANEIVNNKVEIDHIIPYSLCFDDSSANKVLVHKQSNQEKSNSLPYEYIKQGHSGWNWDEFTKYVKRVFVNNVDSILSKKERLKKSENLLTTSYDGYDKLGFLARNLNDTRYATILFRDQLNNYAEHHLIDNKKMFKVIAMNGAVTSFIRKNMSYDNKLRLKDRSDFSHHAYDAAIIALFSNKTKTLYNLIDPSLNGIISKRSEGYWVIEDRYTGEIKELKKEDWTSIKNNVQARKIAKEIEEYLIDLDDEVFFSRKTKRKTNRQLYNETIYGIAAKTDEDGITNYYKKEKFSILDDKDIYLRLLREREKFVINQSNPEVIDQIIEIIESYGKENNIPSRDEAINIKYTKNKINYNLYLKQYMRSLTKSLDQFSEEFINQMIANKTFVLYNPTKNTTRKIKFLRLVNDVKINDIRKNQVINKFNGKNNEPKAFYENINSLGAIVFKNSANNFKTLSINTQIAIFGDKNWDIEDFKTYNMEKIEKYKEIYGIDKTYNFHSFIFPGTILLDKQNKEFYYISSIQTVRDIIEIKFLNKIEFKDENKNQDTSKTPKRLMFGIKSIMNNYEQVDISPFGINKKIFE

SEQ ID NO: 1077 - protein, 1239 aa, Mycoplasma cynos
MEEKRKVTLGFDLGVASVGWAIVDSETNEVYKLGSRLFDIPDTNIDRRAKRGSRRLVRRRSYRNQKFYNLIKRTKTFGFLDKEAIEKEFVLLSIKYPNIIELKVKGLQEEVSKSEAVWILHDYLKNRGYFYDDKEEKDDLENPSIESMPSYKLYEFYKEYGYFKGALSSPTESEKNKDSDLEKAIFFNFSNKEWTKEINHFFKIQKNIFSEDFKAKFMEFFSFIRDISKGPGSENMPSQYSIFGKYGDDGMGGKYQHIWDKNIGKCSIFKDKVRAPKYLPSALFFNLLNELSNIRLYSVDKREKSVLWRLSSKDKINIILNILQIILFKNDGKISNLDINKIVKNESIKSIILNEIDLDLIKDMWFEKEPNVYGIGLSGLNIEENKKENRFKFQDLKIFSVFIDLLKKSNINIEFNNEKDIIHNLKLLDELYFFLITQKYSRDKYGSIKKFILNNKSFNIDNLDEKLNIFLSISDDEFDNHNSKTHSLSKEAIYFIFPKLLHNNEGWNLEAIKNYDIDVREEISKHSFGIKKQDKKYLDDAFLDDAILPPSVKVTIKQSILIFNKIIKKFSNKFQIDNVVIELAREMTQEKEMDAQKSLNRLKKSRKKIIEERLNANNIDSKMFRDKTGEISPNYIYKIYLWISQNFKDPYTGENISANDILKNNVEIDHIIPYSLCFDDSSSNKVLVFKHSNQSKGNFLPFDMISTFSENSVWNWKEYTQYVEKTFKTNLESILDKKERVKKADNLLTSSYDGYDKLGFLARNLNDTRYATILFRDQLINYSENHLIDSKKMFKVIAMNGGVTSFIRKNMSFDSGLKVKDRSIFSHHAYDAAIIALFSNKTKILYNLINPSLDGIISKRSEGYWVLEDRLTGEIRKLNYNDWQSIKNNVEVKKIAREIESHLSNLDNVVMFSRKSKRKTNKELYNETLYGIATRIDENGIKNYYKKEKFNILEDENIYLRLLNERENFIINRSNPEVIDAIIEIFETIDKNKIPARDVAKNIKYTDNKIKYNLYLKDYMRKLVDEFPDKFRKDFIEQMIAKKIFILFNPIKNTTRKIKSLRSINNNKIEDIRKKQVLEKFNTAKNEPRSFYESLNSLGAIIFKNNLNIYKKMSISSQIATFGDKNWKIDDINTYNKEKLNKYKEIYGIDETYDFYSFIFPGTILLDEKNKEFLYISSIQTLKDKIELKFLDRIEFEKKNVNSNLKPKIKREIISTKKLMSDYKIIKISPLGINKKIFE

SEQ ID NO: 1078 - protein, 1269 aa, Mycoplasma gallisepticum
MNNSIKSKPEVTIGLDLGVGSVGWAIVDNETNIIHHLGSRLFSQAKTAEDRRSFRGARRLIRRRKYKLKRFINLIWKYNSYFGFKNKEDILNNYQEQQKLHNTVLNLKLEALNAKIDPKALSWILHDYLKNRGHFYEDNRDFNVYPTEELANYFGEYGYYKGIIDSKEDNDDKLEEGLTKYKFSNQHWLEEIKKVLSNQTGLPEKFKEEYESLFSYVRNYSEGPGSINSVSPYGIYHLDEKEGKVVQKYNNIWDKTIGKCSIFPDEYRAPKNSPIAMIFNEINELSTIRSYSIYLTGWFINQEFKKAYLNKLLDLLIKTNSEKPIDARQFKKLREETIAESIGKETLKDVEREEKLEKEDHKWKLKGLKLNTNGKIQYNDLSSLAKFVHKLKQHLKLDFLLEDQYTTLDKINFLQSLFVYLGKHLRYSNRVDSANLKEFSDSNKLFERVLQEQKDDLFKLFEQTDKDDEKILAQTHSLSTKAMLLAITRMTNLDNDEDNQKNNDKGWNFEAIKNFDQKFIDITKKNNNLSLKQDKRYLDDRFINDAILSPGVKRILREATKVFNAILKQFSEEYDVTKVVIELARELSEEKELENTKNYEKLIKKNSDKISERLEALDIAEDKIEDILKSPTKSYKVLLWLQQDHIDPYSQKEIAFEDILTKTEKTEIDHIIPYSISFDDSSSNKLLVLAESNQAKSNQTPYEFITSGNAGIKWEDYEAYCRKFKDGDTSLLDSTQRSKKFAKMMKTDTSSKYDIGFLARNLNDTRYATIVFRDALKDYANNHLVEDKPMFKVVCINGGVTSFLRKNFDKSWYAKKDRDKNIHHAVDASIISIFSNETKTLFNQLTQFADYKLFKNTDGSWKKIDPKTGVVTEVTDENWKQIRVRNQVSEIAKVINKCIQDSNIERKARYSRKIENKTNISLFNDTVYSAKKVGYEDQIKRKNLKTLDIHESAEENKNSKVKKQFVYRKLVNVSLLNNDKLADLFAEKEDILMYRANPWVINLAEQIFNEYTENKKIKSQNVFEKYMLDLTKEFPEKFSEAFVKSMLRNKTAIIYNVEKKVVHRIKRLKILSSELKENKLSNVIIRSKNESGTKLSYQDTINSIALMIMRSIDPTAKKQYIRVPLNTLNLHLGDQDFDLHNIDAYLKKPKFVKYLKANEIGDEYKPWRVLTSGTLLIHKKDKKLMYISSFQNLKDVIEIKNLIETEYKENDDSDPKKKKKANRFLMTLSTILNDYILLDAKDNFDILGLSKNRIDEILNSKLGLDKITK

SEQ ID NO: 1079 - protein, 1224 aa, Mycoplasma gallisepticum
MNNSIKSKPEVTIGLDLGVGSVGWAIVDNETNIIHHLGSRLFSQAKTAEDRRSFRGARRLIRRRKYKLKRFINLIWKYNSYFGFKNKEDILNNYQEQQKLHNTVLNLKLEALNAKIDPKALSWILHDYLKNRGHFYEDNRDFNVYPTEELANYFGEYGYYKGIIDSKEDNDDKLEEGLTKYKFSNQHWLEEIKKVLSNQTGLPEKFKEEYESLFSYVRNYSEGPGSINSVSPYGIYHLDEKEGKVVQKYNNIWDKTIGKCSIFPDEYRAPKNSPIAMIFNEINELSTIRSYSIYLTGWFINQEFKKAYLNKLLDLLIKTNSEKPIDARQFKKLREETIAESIGKETLKDVEREEKLEKEDHKWKLKGLKLNTNGKIQYNDLSSLAKFVHKLKQHLKLDFLLEDQYTTLDKINFLQSLFVYLGKHLRYSNRVDSANLKEFSDSNKLFERVLQEQKDDLFKLFEQTDKDDEKILAQTHSLSTKAMLLAITRMTNLDNDEDNQKNNDKGWNFEAIKNFDQKFIDITKKNNNLSLKQDKRYLDDRFINDAILSPGVKRILREATKVFNAILKQFSEEYDVTKVVIELARELSEEKELENTKNYEKLIKKNSDKISERLEALDIAEDKIEDILKSPTKSYKVLLWLQQDHIDPYSQKEIAFEDILTKTEKTEIDHIIPYSISFDDSSSNKLLVLAESNQAKSNQTPYEFITSGNAGIKWEDYEAYCRKFKDGDTSLLDSTQRSKKFAKMMKTDTSSKYDIGFLARNLNDTRYATIVFRDALKDYANNHLVEDKPMFKVVCINGGVTSFLRKNFDKSWYAKKDRDKNIHHAVDASIISIFSNETKTLFNQLTQFADYKLFKNTDGSWKKIDPKTGVVTEVTDENWKQIRVRNQVSEIAKVINKCIQDSNIERKARYSRKIENKTNISLFNDTVYSAKKVGYEDQIKRKNLKTLDIHESAEENKNSKVKKQFVYRKLVNVSLLNNDKLADLFAEKEDILMYRANPWVINLAEQIFNEYTENKKIKSQNVFEKYMLDLTKEFPEKFSEAFVKSMLRNKTAIIYNVEKKVVHRIKRLKILSSELKENKLSNVIIRSKNESGTKLSYQDTINSIALMIMRSIDPTAKKQYIRVPLNTLNLHLGDQDFDLHNIDAYLKKPKFVKYLKANEIGDEYKPWRVLTSGTLLIHKKDKKLMYISSFQNLKDVIEIKNLIETEYKENDDSDPKKRRKQIGS

SEQ ID NO: 1080 - protein, 1269 aa, Mycoplasma gallisepticum; identical to SEQ ID NO: 133

SEQ ID NO: 1081 - protein, 226 aa, Mycoplasma iowae
MSNKKKITIGLDIGVSSVGWSILREDNVLIDYGSRLFPDAANAKDGKLENEARRSHRSMRRRIRRIKTRKNDLIKLLIKYNIISDQDELAKILEQGIVNETGNVPIVEIKYKGLKEKLSKEELLICLYHYIHKRGYFYITEEDLKENGENINRLPTEIQYDFYMKNGYYIGNEDNQKFSNLIWVKEIEKFLSKQSLDSNFVDEYISLFRRVRDYSDGPGSEKSPTP

SEQ ID NO: 1082 - protein, 1304 aa, Mycoplasma synoviae
MLNNVQNLWKYLLLLIFDKKIIFLFKIKVILIRRYMENNNKEKIVIGFDLGVASVGWSIVNAETKEVIDLGVRLFSEPEKADYRRAKRTTRRLLRRKKFKREKFHKLILKNAEIFGLQSRNEILNVYKDQSSKYRNILKLKINALKEEIKPSELVWILRDYLQNRGYFYKNEKLTDEFVSNSFPSKKLHEHYEKYGFFRGSVKLDNKLDNKKDKAKEKDEEEESDAKKESEELIFSNKQWINEIVKVFENQSYLTESFKEEYLKLFNYVRPFNKGPGSKNSRTAYGVFSTDIDPETNKFKDYSNIWDKTIGKCSLFEEEIRAPKNLPSALIFNLQNEICTIKNEFTEFKNWWLNAEQKSEILKFVFTELFNWKDKKYSDKKFNKNLQDKIKKYLLNFALENFNLNEEILKNRDLENDTVLGLKGVKYYEKSNATADAALEFSSLKPLYVFIKFLKEKKLDLNYLLGLENTEILYFLDSIYLAISYSSDLKERNEWFKKLLKELYPKIKNNNLEIIENVEDIFEITDQEKFESFSKTHSLSREAFNHIIPLLLSNNEGKNYESLKHSNEELKKRTEKAELKAQQNQKYLKDNFLKEALVPLSVKTSVLQAIKIFNQIIKNFGKKYEISQVVIEMARELTKPNLEKLLNNATNSNIKILKEKLDQTEKFDDFTKKKFIDKIENSVVFRNKLFLWFEQDRKDPYTQLDIKINEIEDETEIDHVIPYSKSADDSWFNKLLVKKSTNQLKKNKTVWEYYQNESDPEAKWNKFVAWAKRIYLVQKSDKESKDNSEKNSIFKNKKPNLKFKNITKKLFDPYKDLGFLARNLNDTRYATKVFRDQLNNYSKHHSKDDENKLFKVVCMNGSITSFLRKSMWRKNEEQVYRFNFWKKDRDQFFHHAVDASIIAIFSLLTKTLYNKLRVYESYDVQRREDGVYLINKETGEVKKADKDYWKDQHNFLKIRENAIEIKNVLNNVDFQNQVRYSRKANTKLNTQLFNETLYGVKEFENNFYKLEKVNLFSRKDLRKFILEDLNEESEKNKKNENGSRKRILTEKYIVDEILQILENEEFKDSKSDINALNKYMDSLPSKFSEFFSQDFINKCKKENSLILTFDAIKHNDPKKVIKIKNLKFFREDATLKNKQAVHKDSKNQIKSFYESYKCVGFIWLKNKNDLEESIFVPINSRVIHFGDKDKDIFDFDSYNKEKLLNEINLKRPENKKFNSINEIEFVKFVKPGALLLNFENQQIYYISTLESSSLRAKIKLLNKMDKGKAVSMKKITNPDEYKIIEHVNPLGINLNWTKKLENNN

SEQ ID NO: 1083 - protein, 1401 aa, Myroides injenensis
MKRILGLDLGTTSIGWAYVHEAENVNETSSIQKVGVRVNPLTTEEQTNFEKGKPITTNASRTLARSARRNLQRYKLRRDNLIQILKENNWINNTTSLTETGNHSTFETYELRNKAASEKLTLDQLSRVLLMLNKKRGYKSSRKVNSKEEGQLIDGMEVAKKLYHEQLTPGQLSLQLMNQGVKKLPDYYRSDLNQELESIWNFQQQFYPNILTDKFKEEINGKGLTSTSSAFWNIYNFNTAENKGSRDEKKKQALQWRSEALSKQLSKEIVAYIIADLNGQIYNSSGYLGAISDRSKELYFNNLTVGQYLFKQLKSNPHTSLKNQVFYRQDYLNEFEKIWETQSKFYPKELTAALKREIRDVIIFYQRKLKSQKGLISFCEFEQKQKTINGKTKTIGHRVIPKSSPLFQEFKIWQQLHNVVLRNKKTNEIVSLADEQKVHLFEELNLKGKLKSNQVLKLIENKPKDWELNYTELEGNNTNKALYNAYLDILDIEGYDVRNELKVKLNKDDIELSDLDVNASEIKEMIFSVFKHLGINTEILEFDATLEDKVFEKQASYQLWHLLYSYEEDNSPTGLDRLYNLLHKKFGFKLNHAKLIGNVLFQDDYGSLSSKAIKNIFPYITENNYYTACELAGYKHSKHSLTKEENETRELKNRLTILPKNSLRNPVVEKIINQMINVVNTLIDEENNILIAQGKEPNFQFDEIRIELARELKKNAKEREELTKSINKSKTDHEKIIKILQKEDGIKNPTRNDIVRFKLYSELKNNGYKDLYTNEYIERKDIFTKEYDIEHIIPQSKLFDDSFSNKTLVRRNVNLKKGNQTAYDFILCEYGQEKANEFETRITNLYNLGKDEGISKSKFKKLLMQESEIGNGFIERDLRETQYIAKKAKSLLLEITRNVISTSGSITDRLREDWGLINVMKELNLQKYRDAGLTEFVKMKDGNKKEVIIDWTKRNDHRHHAMDALTIAFTKHNHIQYLNHLNARKNVNNELHNNIIAIEKLETTLVSDERGNKKRIFKEPIANFRTIAKSHLEAILVSHKAKNKVVTKNINKISGKKISQQTLTPRGQLHKETIYGKIRQYVSKQEKVGPKFTIEVIEQVSNPTYRNLLLKRLEENNNDPKKAFGGKNSLNKNPIYINLEKNIKVPEVLKLVWLEDNYTIRKEISPDLKIDKVIDQGVKQILQNRLAQYKGDSKLAFSNLDANPIWLNEDKGIAIKRVTISGIATAQPLHRKKDHLGQPILDHNGQEIPVDFISTGNNHHVAIYEDENGKLQESVVSHFEAVERVNQKLPIIDKTFNQHLGWKFLFTMKQNELFLFPSDDFNPNEIDLFDKQNYTVISKHLFRIQKLSTKDYSFRHHLETNVEEIKDLKTITWRREGLNGIQNIIKVRTNHLGEIIHIGEY

SEQ ID NO: 1084 - protein, 1466 aa, Myroides odoratus
MKNILGLDLGTNSIGWALVKEDFENKQGEILGLGSRIIPMSQDILGEFGRGNSISQTADRTGYRGVRRLRERHLLRRERLHRVLNILGFLPNHYAKEIDFTKRLGKFINHAEPKLSFDKEFIFKDSFNEMLKDFQQNQPGFIINKHGEEALVPYDWTIYYLRKKALTQKIDKEELAWILLNFNQKRGYYQLRGEEEEENTNKLVEFYSLKIIDVIADNEVNKKGEVWYSLHLENGWIYRRSSKISLVDWKDKVRDFIVTTDVNDDGSEKLDKDGVVKRSFRAPSADDWTLLKKKTEQDIDNSNKTVGAYIYENLLLNPKQKIKGKLVRTIERKFYKDELKQILEKQKEFHQELQNEQLLQDCVRELYKYNEQHQQMLESKDFVHLFLNDIIFYQRPLRSQKSLISNCTLEKRVSRDGVVFPIKVISKSNPYYQEFRLLQWLQNLAIYRKDDDVNVTQEFLNSIESWENLLQFLNAKKEIKQEQLIKFLLEQKGLKGNSLKTAILTYRWNYVTDKVYPMNETRSLIQDKLKKVENVATDFLSFDNEMALWHIIYSVNDKIEYEKALAKFASKHNLDEISFVESFKKFPPFKSDYGSFSEKAIKKLLPLMRFGSVWNKNNIVPSVLDRIDKILTGEYDEKIKIRVREKAEQFQLNQIEDFQNLPLWLAQYVVYDRHSEAEIAGKWNSVKDLENYLKEFKQHSLRNPIVEQIITETLRVVKDIWQQYGNGVQNFFDEIHIELGREMKNTADERKRITNSVTENENTNLRIKALLVELKEDTNIENVRPHSPMQQEILKIYEEGVLNAVENIDEDILKISKTAQPSKSELIRYKLWLEQKYQSPYTGEMIPLSRLFTSDYEIEHVIPQSRYFDDSLSNKVICEAAVNKRKDNQLGLEFIKNHHSEKIELGNGRTAQVLEVEAYESFVKKNYDKNRGKRNKLLLEDVPEKMIERQLNDTRYISKFVTHLLSNIVRKDEVNSKDDGINSKNIIPGNGKITSQLKQDWGLNDVWNELILPRFERMNNLTNSTDFTSTNTNGKIIPTVPLEYSKGFSKKRIDHRHHALDALVIALATRDHVNLLNNESALPKKDRTKEEQKSFRFDLQVNLRNKEKYFNVKEGREKEKFTTFKKPWNTLTQDTRDALENMVVSFKQNLRVINKATNYYESYTDENGNLRLDKYGNPKKELISQKGTNWAIRKSLHKETVSGQIHLDRVKVTKGKIVTATRKSLDSSFNEKSIESITDTGIQKILRNYLKAKDNKPDVAFSPEGIEELNKSISVYNEGKNHQPIIKVRIFEQGSKFPVGETGNKIAKFVEAAKGTNLFFGIYQDKTGKRSYDTIPLNLVIERLKQGLSPVPETNEKGHQLLFHLSPNDLVYVPTIDDNEQLDSNRVYKFTDSSDTTCNFIPSNISAIIFNINSKEQEKRGINYPIQNELGVGSPQSKNQKSFDGFMIKEVCIKLKVDRLGNISKT

SEQ ID NO: 1085 - protein, 241 aa, Neisseria lactamica
MAAFKPNPMNYILGLDIGIASVGWAMVEIDKEENPIRLIDLGVRVFERAEMPKTGDSLAMARRLARSVRRLTRRRAHRLLRARRLLKREGVLQDADFDENGLVKSLPNTPWQLRAAALDRKLTCLEWSAVLLHLIKHRGYLSQRKNEGETADKELGALLKGVADNAHALQTGDFRTPAELALNKFEKESGHIRNQRGDYSHTFSRKDLQAELNLLFEKQKEFGNPHVSDGLKEGIETLLMA

SEQ ID NO: 1086 - protein, 666 aa, Neisseria lactamica
MAAFKPNPMNYILGLDIGIASVGWAMVEVDEEENPIRLIDLGVRVFERAEVPKTGDSLAMARRLARSVRRLTRRRAHRLLRARRLLKREGVLQDADFDENGLVKSLPNTPWQLRAAALDRKLTCLEWSAVLLHLVKHRGYLSQRKNEGETADKELGALLKGVADNAHALQTGDFRTPAELALNKFEKESGHIRNQRGDYSHTFSRKDLQAELNLLFEKQKEFGNPHVSDGLKEDIETLLMAQRPALSGDAVQKMLGHCTFEPAEPKAAKNTYTAERFIWLTKLNNLRILEQGSERPLTDTERATLMDEPYRKSKLTYAQARKLLGLEDTAFFKGLRYGKDNAEASTLMEMKAYHAISRALEKEGLKDKKSPLNLSTELQDEIGTAFSLFKTDKDITGRLKDRVQPEILEALLKHISFDKFVQISLKALRRIVPLMEQGKRYDEACAEIYGDHYCKKNAEEKIYLPPIPADEIRNPVVLRALSQARKVINCVVRRYGSPARIHIETAREVGKSFKDRKEIEKRQEENRKDREKAAAKFREYFPNFVGEPKSKDILKLRLYEQQHGKCLYSGKEINLVRLNEKGYVEIDHALPFSRTWDDSFNNKVLVLGSENQNKGNQTPYEYFNGKDNSREWQEFKARVETSRFPRSKNNGFCCKNSMKKDLKNAT

SEQ ID NO: 1087 - protein, 828 aa, Neisseria lactamica
MLGHCTFEPAEPKAAKNTYTAERFIWLTKLNNLRILEQGSERPLTDTERATLMDEPYRKSKLTYAQARKLLGLEDTAFFKGLRYGKDNAEASTLMEMKAYHAISRALEKEGLKDKKSPLNLSTELQDEIGTAFSLFKTDKDITGRLKDRVQPEILEALLKHISFDKFVQISLKALRRIVPLMEQGKRYDEACAEIYGDHYGKKNTEEKIYLPPIPADEIRNPVVLRALSQARKVINAVVRRYDSPARIHIETAREVGKSFKDRKEIEKRQEENRKDREKAAAKFREYFPNFVGEPKSKDILKLRLYEQQHGKCLYSGKEINLVRLNEKGYVEIDHALPFSRTWDDSFNNKVLVLGSENQNKGNQTPYEYFNGKDNSREWQEFKARVETSRFPRSKKQRILLQKFDEEGFKERNLNDTRYVNRFLCQFVADHILLTGKGKRRVFASNGQITNLLRGFWGLRKVRAENDRHHALDAVVVACSTVAMQQKITRFVRYKEMNAFDGKTIDKETGEVLHQKAHFPQPWEFFAQEVMIRVFGKPDGKPEFEEADTSEKLRTLLAEKLSSRPEAVHEYVTPLFVSRAPNRKMSGQGHMETVKSAKRLDEGISVLRVPLTQLKLKDLEKMVNREREPKLYDALKAQLETHKDDPAKAFAEPFYKYDKAGSRTQQVKAVRIEQVQKTGVWVRNHNGIADNATMVRVDVFEKGGKYYLVPIYSWQVAKGILPDRAVVAFKDEEDWTVMDDSFEFRFVLYANDLIKAELKKETFFGYFSGLDRSTGNISLRSHDLDKTKGKDGVYRIGIKTALSFQKHQIDELGKEIRPCRLKKRPPVR

SEQ ID NO: 1088 - protein, 408 aa, Neisseria lactamica
MNDTRYVNRFLCQFVADHILLTGKGKRRVFASNGQITNLLRGFWGLRKVRTENDRHHALDAVVVACSTVAMQQKITRFVRYKEMNAFDGKTIDKETGEVLHQKAHFPQPWEFFAQEVMIRVFGKPDGKPEFEEADTPEKLRTLLAEKLSSRPEAVHEYVTPLFVSRAPNRKMSGQGHMETVKSAKRLDEGISVLRVPLTQLKLKGLEKMVNREREPKLYDALKAQLETHKDDPAKAFAEPFYKYDKAGSRTQQVKAVRIEQVQKTGVWVRNHNGIADNATMVRVDVFEKGGKYYLVPIYSWQVAKGILPDRAVVAFKDEEDWTVMDDSFEFRFVLYANDLIKLTAKKNEFLGYFVSLNRATGAIDIRTHDTDSTKGKNGIFQSVGVKTALSFQKTKSTNSAKKSDHAV

SEQ ID NO: 1089 - protein, 1082 aa, Neisseria meningitidis
MAAFKPNPINYILGLDIGIASVGWAMVEIDEDENPICLIDLGVRVFERAEVPKTGDSLAAARRLARSVRRLTRRRAHRLLRARRLLKREGVLQAADFDENGLIKSLPNTPWQLRAAALDRKLTPLEWSAVLLHLIKHRGYLSQRKNEGETADKELGALLKGVADNAHALQTGDFRTPAELALNKFEKESGHIRNQRGDYSHTFSRKDLQAELILLFEKQKEFGNPHVSGGLKEGIETLLMTQRPALSGDAVQKMLGHCTFEPAEPKAAKNTYTAERFIWLTKLNNLRILEQGSERPLTDTERATLMDEPYRKSKLTYAQARKLLGLEDTAFFKGLRYGKDNAEASTLMEMKAYHAISRALEKEGLKDKKSPLNLSPELQDEIGTAFSLFKTDEDITGRLKDRVQPEILEALLKHISFDKFVQISLKALRRIVPLMEQGKRYDEACAEIYGDHYGKKNTEEKIYLPPIPADEIRNPVVLRALSQARKVINGVVRRYGSPARIHIETAREVGKSFKDRKEIEKRQEENRKDREKAAAKFREYFPNFVGEPKSKDILKLRLYEQQHGKCLYSGKEINLGRLNEKGYVEIDHALPFSRTWDDSFNNKVLVLGSENQNKGNQTPYEYFNGKDNSREWQEFKARVETSRFPRSKKQRILLQKFDEDGFKERNLNDTRYVNRFLCQFVADRMRLTGKGKKRVFASNGQITNLLRGFWGLRKVRAENDRHHALDAVVVACSTVAMQQKITRFVRYKEMNAFDGKTIDKETGEVLHQKTHFPQPWEFFAQEVMIRVFGKPDGKPEFEEADTPEKLRTLLAEKLSSRPEAVHEYVTPLFVSRAPNRKMSGQGHMETVKSAKRLDEGVSVLRVPLTQLKLKDLEKMVNREREPKLYEALKARLEAHKDDPAKAFAEPFYKYDKAGNRTQQVKAVRVEQVQKTGVWVRNHNGIADNATMVRVDVFEKGDKYYLVPIYSWQVAKGILPDRAVVQGKDEEDWQLIDDSFNFKFSLHPNDLVEVITKKARMFGYFASCHRGTGNINIRIHDLDHKIGKNGILEGIGVKTALSFQKYQIDELGKEIRPCRLKKRPPVR

SEQ ID NO: 1090 - protein, 976 aa, Neisseria meningitidis
MAAFKPNPINYILGLDIGIASVGWAMVEIDEDENPICLIDLGVRVFERAEVPKTGDSLAAARRLARSVRRLTRRRAHRLLRARRLLKREGVLQAADFDENGLIKSLPNTPWQLRAAALDRKLTPLEWSAVLLHLIKHRGYLSQRKNEGETADKELGALLKGVADNAHALQTGDFRTPAELALNKFEKESGHIRNQRGDYSHTFSRKDLQAELILLFEKQKEFGNPHVSGGLKEGIETLLMTQRPALSGDAVQKMLGHCTFEPAEPKAAKNTYTAERFIWLTKLNNLRILEQGSERPLTDTERATLMDEPYRKSKLTYAQARKLLGLEDTAFFKGLRYGKDNAEASTLMEMKAYHAISRALEKEGLKDKKSPLNLSPELQDEIGTAFSLFKTDEDITGRLKDRIQPEILEALLKHISFDKFVQISLKALRRIVPLMEQGKRYDEACAEIYGDHYGKKNTEEKIYLPPIPADEIRNPVVLRALSQARKVINGVVRRYGSPARIHIETAREVGKSFKDRKEIEKRQEENRKDREKAAAKFREYFPNFVGEPKSKDILKLRLYEQQHGKCLYSGKEINLGRLNEKGYVEIDHALPFSRTWDDSFNNKVLVLGSENQNKGNQTPYEYFNGKDNSREWQEFKARVETSRFPRSKKQRILLQKFDEDGFKERNLNDTRYVNRFLCQFVADRMRLTGKGKKRVFASNGQITNLLRGFWGLRKVRAENDRHHALDAVVVACSTVAMQQKITRFVRYKEMNAFDGKTIDKETGEVLHQKTHFPQPWEFFAQEVMIRVFGKPDGKPEFEEADTPEKLRTLLAEKLSSRPEAVHEYVTPLFVSRAPNRKMSGQGHMETVKSAKRLDEGVSVLRVPLTQLKLKDLEKMVNREREPKLYEALKARLEAHKDDPAKAFAEPFYKYDKAGNRTQQVKAVRVEQVQKTGVWVRNHNGIADNATMVRVDVFEKGDKYYLVPIYSWQVAKGIFAG

SEQ ID NO: 1091 - protein, 1081 aa, Neisseria meningitidis
MAAFKPNPINYILGLDIGIASVGWAMVEIDEDENPICLIDLGVRVFERAEVPKTGDSLAAARRLARSVRRLTRRRAHRLLRARRLLKREGVLQAADFDENGLIKSLPNTPWQLRSAALDRKLTPLEWSAVLLHLIKHRGYLSQRKNEGETADKELGALLKGVADNAHALQTGDFRTPAELALNKFEKESGHIRNRRGDYSHTFSRKDLQAELDLLFEKQKEFGNPHISDDLKEGIETLLMTQRPALSGDAVQKMLGHCTFEPTEPKAAKNTYTAERFVWLTKLNNLRILEQGSERPLTDTERATLMDEPYRKSKLTYAQARKLLELDDTAFFKGLRYGKDNAEASTLMEMKAYHAISRALEKEGLKDKKSPLNLSPELQDEIGTAFSLFKTDEDITGRLKDRVQPEILEVLLKHISFDKFVQISLKALRRIVPLMEQGKRYDEACAEIYGDHDGKKNTEEKIYLPPIPADEIRNPVVLRALSQARKVINAVVRRYGSPARIHIETAREVGKSFKDRKEIEKRQEENRKDREKAAAKFREYFPNFVGEPKSKDILKLRLYEQQHGKCLYSGKEINLGRLNEKGYVEIDHALPFSRTWDDSFNNKVLVLGSENQNKGNQTPYEYFNGKDNSREWQEFKARVETSRFPRSKKQRILLQKFDEEGFKERNLNDTRYVNRFLCQFVADHMLLTGKGKRRVFASNGQITNLLRGFWGLRKVRAENNRHHALDAVVVACSTVAMQQKITRFVRYKEMNAFDGKTIDKETGEVLHQKTHFPQPWEFFAQEVMIRVFGKPDGKPEFEEADTPEKLRTLLAEKLSSRPEAVHEYVTPLFVSRAPNRKMSGQGHMETVKSAKRLDEGVSVLRVPLTQLKLKDLEKMVNREREPKLYEALKARLEAHKDDPAKAFAEPFYKYDKAGNRTQQVKAVRVEQVQKTGVWVRNHNGIADNATMVRVDVFEKAGKYYLVPIYSWQVAKGILPDRAVVAYADEEGWTVIDESFRFKFVLYSNDLIKVQLKKDSFLGYFSGLDRATGAISLREHDLEKSKGKDGMHRIGVKTALSFQKYQIDEMGKEIRLCRLKKRPPVR

SEQ ID NO: 1092 - protein, 1081 aa, Neisseria meningitidis
MAAFKPNPINYILGLDIGIASVGWAMVEIDEDENPICLIDLGVRVFERAEVPKTGDSLAAARRLARSVRRLTRRRAHRLLRARRLLKREGVLQAADFDENGLIKSLPNTPWQLRSAALDRKLTPLEWSAVLLHLIKHRGYLSQRKNEGETADKELGALLKGVANNAHALQTGDFRTPAELALNKFEKESGHIRNQRGDYSHTFSRKDLQAELILLFEKQKEFGNPHVSGGLKEGIETLLMTQRPALSGDAVQKMLGHCTFEPAEPKAAKNTYTAERFIWLTKLNNLRILEQGSERPLTDTERATLMDEPYRKSKLTYAQARKLLGLEDTAFFKGLRYGKDNAEASTLMEMKAYHAISRALEKEGLKDKKSPLNLSPELQDEIGTAFSLFKTDEDITGRLKDRIQPEILEALLKHISFDKFVQISLKALRRIVPLMEQGKRYDEACAEIYGDHYGKKNTEEKIYLPPIPADEIRNPVVLRALSQARKVINGVVRRYGSPARIHIETAREVGKSFKDRKEIEKRQEENRKDREKAAAKFREYFPNFVGEPKSKDILKLRLYEQQHGKCLYSGKEINLGRLNEKGYVEIDHALPFSRTWDDSFNNKVLVLGSENQNKGNQTPYEYFNGKDNSREWQEFKARVETSRFPRSKKQRILLQKFDEDGFKERNLNDTRYVNRFLCQFVADRMRLTGKGKKRVFASNGQITNLLRGFWGLRKVRAENDRHHALDAVVVACSTVAMQQKITRFVRYKEMNAFDGKTIDKETGEVLHQKTHFPQPWEFFAQEVMIRVFGKPDGKPEFEEADTPEKLRTLLAEKLSSRPEAVHEYVTPLFVSRAPNRKMSGQGHMETVKSAKRLDEGVSVLRVPLTQLKLKDLEKMVNREREPKLYEALKARLEAHKDDPAKAFAEPFYKYDKAGNRTQQVKAVRVEQVQKTGVWVRNHNGIADNATMVRVDVFEKAGKYYLVPIYSWQVAKGILPDRAVVAYADEEGWTVIDESFRFKFVLYSNDLIKVQLKKDSFLGYFSGLDRATGAISLREHDLEKSKGKDGMHRIGVKTALSFQKYQIDEMGKEIRLCRLKKRPPVR

SEQ ID NO: 1093 - protein, 1082 aa, Neisseria meningitidis
MAAFKPNPINYILGLDIGIASVGWAMVEIDEDENPICLIDLGVRVFERAEVPKTGDSLAMARRLARSVRRLTRRRAHRLLRARRLLKREGVLQAADFDENGLIKSLPNTPWQLRAAALDRKLTPLEWSAVLLHLIKHRGYLSQRKNEGETADKELGALLKGVADNAHALQTGDFRTPAELALNKFEKESGHIRNQRGDYSHTFSRKDLQAELILLFEKQKEFGNPHVSGGLKEGIETLLMTQRPALSGDAVQKMLGHCTFEPAEPKAAKNTYTAERFIWLTKLNNLRILEQGSERPLTDTERATLMDEPYRKSKLTYAQARKLLGLEDTAFFKGLRYGKDNAEASTLMEMKAYHAISRALEKEGLKDKKSPLNLSPELQDEIGTAFSLFKTDEDITGRLKDRIQPEILEALLKHISFDKFVQISLKALRRIVPLMEQGKRYDEACAEIYGDHYGKKNTEEKIYLPPIPADEIRNPVVLRALSQARKVINGVVRRYGSPARIHIETAREVGKSFKDRKEIEKRQEENRKDREKAAAKFREYFPNFVGEPKSKDILKLRLYEQQHGKCLYSGKEINLGRLNEKGYVEIDHALPFSRTWDDSFNNKVLVLGSENQNKGNQTPYEYFNGKDNSREWQEFKARVETSRFPRSKKQRILLQKFDEDGFKERNLNDTRYVNRFLCQFVADRMRLTGKGKKRVFASNGQITNLLRGFWGLRKVRAENDRHHALDAVVVACSTVAMQQKITRFVRYKEMNAFDGKTIDKETGEVLHQKTHFPQPWEFFAQEVMIRVFGKPDGKPEFEEADTPEKLRTLLAEKLSSRPEAVHEYVTPLFVSRAPNRKMSGQGHMETVKSAKRLDEGVSVLRVPLTQLKLKDLEKMVNREREPKLYEALKARLEAHKDDPAKAFAEPFYKYDKAGNRTQQVKAVRVEQVQKTGVWVRNHNGIADNATMVRVDVFEKGDKYYLVPIYSWQVAKGILPDRAVVQGKDEEDWQLIDDSFNFKFSLHPNDLVEVITKKARMFGYFASCHRGTGNINIRIHDLDHKIGKNGILEGIGVKTALSFQKYQIDELGEEIRPCRLKKRPPVR

SEQ ID NO: 1094 - protein, 1082 aa, Neisseria meningitidis
MAAFKPNPINYILGLDIGIASVGWAMVEIDEDENPICLIDLGVRVFERAEVPKTGDSLAMARRLARSVRRLTRRRAHRLLRARRLLKREGVLQAADFDENGLIKSLPNTPWQLRAAALDRKLTPLEWSAVLLHLIKHRGYLSQRKNEGETADKELGALLKGVADNAHALQTGDFRTPAELALNKFEKESGHIRNQRGDYSHTFSRKDLQAELILLFEKQKEFGNPHVSGGLKEGIETLLMTQRPALSSDAVQKMLGHCTFEPAEPKAAKNTYTAERFIWLTKLNNLRILEQGSERPLTDTERATLMDEPYRKSKLTYAQARKLLGLEDTAFFKGLRYGKDNAEASTLMEMKAYHAISRALEKEGLKDKKSPLNLSPELQDEIGTAFSLFKTDEDITGRLKDRIQPEILEALLKHISFDKFVQISLKALRRIVPLMEQGKRYDEACAEIYGDHYGKKNTEEKIYLPPIPADEIRNPVVLRALSQARKVINGVVRRYGSPARIHIETAREVGKSFKDRKEIEKRQEENRKDREKAAAKFREYFPNFVGEPKSKDILKLRLYEQQHGKCLYSGKEINLGRLNEKGYVEIDHALPFSRTWDDSFNNKVLVLGSENQNKGNQTPYEYFNGKDNSREWQEFKARVETSRFPRSKKQRILLQKFDEDGFKERNLNDTRYVNRFLCQFVADRMRLTGKGKKRVFASNGQITNLLRGFWGLRKVRAENDRHHALDAVVVACSTVAMQQKITRFVRYKEMNAFDGKTIDKETGEVLHQKTHFPQPWEFFAQEVMIRVFGKPDGKPEFEEADTPEKLRTLLAEKLSSRPEAVHEYVTPLFVSRAPNRKMSGQGHMETVKSAKRLDEGVSVLRVPLTQLKLKDLEKMVNREREPKLYEALKARLEAHKDDPAKAFAEPFYKYDKAGNRTQQVKAVRVEQVQKTGVWVRNHNGIADNATMVRVDVFEKGDKYYLVPIYSWQVAKGILPDRAVVQGKDEEDWQLIDDSFNFKFSLHPNDLVEVITKKARMFGYFASCHRGTGNINIRIHDLDHKIGKNGILEGIGVKTALSFQKYQIDELGKEIRPCRLKKRPPVR

SEQ ID NO: 1095 - protein, 1082 aa, Neisseria meningitidis
MAAFKPNPINYILGLDIGIASVGWAMVEIDEDENPICLIDLGVRVFERAEVPKTGDSLAMARRLARSVRRLTRRRAHRLLRARRLLKREGVLQAADFDENGLIKSLPNTPWQLRAAALDRKLTPLEWSAVLLHLIKHRGYLSQRKNEGETADKELGALLKGVADNAHALQTGDFRTPAELALNKFEKESGHIRNQRGDYSHTFSRKDLQAELILLFEKQKEFGNPHVSGGLKEGIETLLMTQRPALSSDAVQKMLGHCTFEPAEPKAAKNTYTAERFIWLTKLNNLRILEQGSERPLTDTERATLMDEPYRKSKLTYAQARKLLGLEDTAFFKGLRYGKDNAEASTLMEMKAYHAISRALEKEGLKDKKSPLNLSPELQDEIGTAFSLFKTDEDITGRLKDRIQPEILEALLKHISFDKFVQISLKALRRIVPLMEQGKRYDEACAEIYGDHYGKKNTEEKIYLPPIPADEIRNPVVLRALSQARKVINGVVRRYGSPARIHIETAREVGKSFKDRKEIEKRQEENRKDREKAAAKFREYFPNFVGEPKSKDILKLRLYEQQHGKCLYSGKEINLGRLNEKGYVEIDHALPFSRTWDDSFNNKVLVLGSENQNKGNQTPYEYFNGKDNSREWQEFKARVETSRFPRSKKQRILLQKFDEDGFKERNLNDTRYVNRFLYQFVADRMRLTGKGKKRVFASNGQITNLLRGFWGLRKVRAENDRHHALDAVVVACSTVAMQQKITRFVRYKEMNAFDGKTIDKETGEVLHQKTHFPQPWEFFAQEVMIRVFGKPDGKPEFEEADTPEKLRTLLAEKLSSRPEAVHEYVTPLFVSRAPNRKMSGQGHMETVKSAKRLDEGVSVLRVPLTQLKLKDLEKMVNREREPKLYEALKARLEAHKDDPAKAFAEPFYKYDKAGNRTQQVKAVRVEQVQKTGVWVRNHNGIADNATMVRVDVFEKGDKYYLVPIYSWQVAKGILPDRAVVQGKDEEDWQLIDDSFNFKFSLHPNDLVEVITKKARMFGYFASCHRGTGNINIRIHDLDHKIGKNGILEGIGVKTALSFQKYQIDELGKEIRPCRLKKRPPVR

SEQ ID NO: 1096 - protein, 1081 aa, Neisseria meningitidis
MAAFKPNPINYILGLDIGIASVGWAMVEIDEDENPICLIDLGVRVFERAEVPKTGDSLAMARRLARSVRRLTRRRAHRLLRARRLLKREGVLQAADFDENGLIKSLPNTPWQLRAAALDRKLTPLEWSAVLLHLIKHRGYLSQRKNEGETADKELGALLKGVADNAHALQTGDFRTPAKLALNKFEKESGHIRNQRGDYSHTFSRKDLQAELNLLFEKQKEFGNPHISDGLKEGIETLLMTQRPALSGDAVQKMLGHCTFEPTEPKAAKNTYTAERFVWLTKLNNLRILEQGSEQPLTDTQRAKLMDEPYRKSKLTYAQARKLLGLEDTAFFKGLRYGKDNAEASTLMEMKAYHAISRALEKEGLKDKKSPLNLSPELQDEIGTAFSLFKTDEDITGRLKDRVQPEILEALLKHISFDKFVQISLKALRRIVPLMEQGKRYNEACAEIYGDHYGKKNTEEKIYLPPIPADEIRNPVVLRALSQARKVINGVVRRYGSPARIHIETAREVGKSFKDRKEIEKRQEENRKDREKAAAKFQEYFPNFVGEPKSKDILKLRLYEQQHGKCLYSGKEINLGRLNEKGYVEIDHALPFSRTWDDSFNNKVLVLGSENQNKGNQTPYEYFNGKDNSREWQEFKARVETSRFPRSKKQRILLQKFDEDGFKERNLNDTRYVNRFLCQFVADRMRLTGKGKKRVFASNGQITNLLRGFWGLRKVRAENDRHHALDAVVVACSTVAMQQKITRFVRYKEMNAFDGKTIDKETGEVLHQKTHFPQPWEFFAQEVMIRVFGKPDGKPEFEEADTPEKLRTLLAEKLSSRPEAVHEYVTPLFVSRAPNRKMSGQGHMETVKSAKRLDEGVSVLRVPLTQLKLKDLEKMVNREREPKLYEALKARLEAHKDDPAKAFAEPFYKYDKAGNRTQQVKAVRVEQVQKTGVWVRNHNGIADNATMVRVDVFEKGDKYYLVPIYSWQVAKGILPDRAVVAYADEEDWTVIDESFRFKFVLYSNDLIKVQLKKDSFLGYFSGLDRATGAISLREHDLEKSKGKDGMHRIGVKTALSFQKYQIDEMGKEIRPCRLKKRPPVR

SEQ ID NO: 1097 - protein, 1081 aa, Neisseria meningitidis
MAAFKPNPINYILGLDIGIASVGWAMVEIDEEENPIRLIDLGVRVFERAEVPKTGDSLAMARRLARSVRRLTRRRAHRLLRARRLLKREGVLQAADFDENGLIKSLPNTPWQLRAAALDRKLTPLEWSAVLLHLIKHRGYLSQRKNEGETADKELGALLKGVADNAHALQTGDFRTPAELALNKFEKECGHIRNQRGDYSHTFSRKDLQAELNLLFEKQKEFGNPHVSGGLKEGIETLLMTQRPALSGDAVQKMLGHCTFEPAEPKAAKNTYTAERFIWLTKLNNLRILEQGSERPLTDTERATLMDEPYRKSKLTYAQARKLLSLEDTAFFKGLRYGKDNAEASTLMEMKAYHTISRALEKEGLKDKKSPLNLSPELQDEIGTAFSLFKTDEDITGRLKDRIQPEILEALLKHISFDKFVQISLKALRRIVPLMEQGKRYDEACAEIYGDHYGKKNTEEKIYLPPIPADEIRNPVVLRALSQARKVINGVVRRYGSPARIHIETAREVGKSFKDRKEIEKRQEENRKDREKAAAKFREYFPNFVGEPKSKDILKLRLYEQQHGKCLYSGKEINLGRLNEKGYVEIDHALPFSRTWDDSFNNKVLVLGSENQNKGNQTPYEYFNGKDNSREWQEFKARVETSRFPRSKKQRILLQKFDEDGFKERNLNDTRYVNRFLCQFVADRMRLTGKGKKRVFASNGQITNLLRGFWGLRKVRAENDRHHALDAVVVACSTVAMQQKITRFVRYKEMNAFDGKTIDKETGEVLHQKTHFPQPWEFFAQEVMIRVFGKPDGKPEFEEADTPEKLRTLLAEKLSSRPEAVHEYVTPLFVSRAPNRKMSGQGHMETVKSAKRLDEGVSVLRVPLTQLKLKDLEKMVNREREPKLYEALKARLEAHKDDPAKAFAEPFYKYDKAGNRTQQVKAVRVEQVQKTGVWVRNHNGIADNATMVRVDVFEKGDKYYLVPIYSWQVAKGILPDRAVVAYADEEDWTVIDESFRFKFVLYSNDLIKVQLKKDSFLGYFSGLDRATGAISLREHDLEKSKGKDGMHRIGVKTALSFQKYQIDEMGKEIRPCRLKKRPPVR

SEQ ID NO: 1098 - protein, 1082 aa, Neisseria meningitidis
MAAFKPNPINYILGLDIGIASVGWAMVEIDEEENPIRLIDLGVRVFERAEVPKTGDSLAMARRLARSVRRLTRRRAHRLLRARRLLKREGVLQAADFDENGLIKSLPNTPWQLRAAALDRKLTPLEWSAVLLHLIKHRGYLSQRKNEGETADKELGALLKGVADNAHALQTGDFRTPAELALNKFEKECGHIRNQRGDYSHTFSRKDLQAELNLLFEKQKEFGNPHVSGGLKEGIETLLMTQRPALSGDAVQKMLGHCTFEPAEPKAAKNTYTAERFIWLTKLNNLRILEQGSERPLTDTERATLMDEPYRKSKLTYAQARKLLGLEDTAFFKGLRYGKDNAEASTLMEMKAYHAISRALEKEGLKDKKSPLNLSPELQDEIGTAFSLFKTDEDITGRLKDRIQPEILEALLKHISFDKFVQISLKALRRIVPLMEQGKRYDEACAEIYGDHYGKKNTEEKIYLPPIPADEIRNPVVLRALSQARKVINGVVRRYGSPARIHIETAREVGKSFKDRKEIEKRQEENRKDREKAAAKFREYFPNFVGEPKSKDILKLRLYEQQHGKCLYSGKEINLVRLNEKGYVEIDHALPFSRTWDDSFNNKVLVLGSENQNKGNQTPYEYFNGKDNSREWQEFKARVETSRFPRSKKQRILLQKFDEEGFKERNLNDTRYVNRFLCQFVADHILLTGKGKRRVFASNGQITNLLRGFWGLRKVRAENDRHHALDAVVVACSTVAMQQKITRFVRYKEMNAFDGKTIDKETGEVLHQKTHFPQPWEFFAQEVMIRVFGKPDGKPEFEEADTPEKLRTLLAEKLSSRPEAVHEYVTPLFVSRAPNRKMSGQGHMETVKSAKRLDEGVSVLRVPLTQLKLKDLEKMVNREREPKLYEALKARLEAHKDDPAKAFAEPFYKYDKAGNRTQQVKAVRVEQVQKTGVWVRNHNGIADNATMVRVDVFEKGGKYYLVPIYSWQVAKGILPDRAVVQGKDEEDWQLIDDSFNFKFSLHPNDLVEVITKKARMFGYFASCHRGTGNINIRIHDLDHKIGKNGILEGIGVKTALSFQKYQIDELGKEIRPCRLKKRPPVR

SEQ ID NO: 1099 - protein, 1081 aa, Neisseria meningitidis
MAAFKPNPINYILGLDIGIASVGWAMVEIDEEENPIRLIDLGVRVFERAEVPKTGDSLAMARRLARSVRRLTRRRAHRLLRARRLLKREGVLQAADFDENGLIKSLPNTPWQLRAAALDRKLTPLEWSAVLLHLIKHRGYLSQRKNEGETADKELGALLKGVADNAHALQTGDFRTPAELALNKFEKESGHIRNQRGDYSHTFSRKDLQAELILLFEKQKEFGNPHVSGGLKEGIETLLMTQRPALSGDAVQKMLGHCTFEPAEPKAAKNTYTAERFIWLTKLNNLRILEQGSERPLTDTERATLMDEPYRKSKLTYAQARKLLGLEDTAFFKGLRYGKDNAEASTLMEMKAYHAISRALEKEGLKDKKSPLNLSPELQDEIGTAFSLFKTDEDITGRLKDRVQPEILEALLKHISFDKFVQISLKALRRIVPLMEQGKRYDEACAEIYGDHYGKKNTEEEIYLPPITADEIRNPVVLRALSQARKVINAVVRRYGSPARIHIETAREVGKSFKDRKEIEKRQEENRKDREKAAAKFREYFPNFVGEPKSKDILKLRLYEQQHGKCLYSGKEINLVRLNEKGYVEIDHALPFSRTWDDSFNNKVLVLGSENQNKGNQTPYEYFNGKENSREWQEFKARVETSRFPRSKKQRILLQKFDEDGFKERNLNDTRYVNRFLCQFVADRMRLTGKGKKRVFASNGQITNLLRGFWGLHKVRAENDRHHALDAVVVACSTIAMQQKITRFVRYKEMNAFDGKTIDKETGEVLHQKAHFPQPWEFFAQEVMIRVFGKPDGKPEFEEADTPEKLRTLLAEKLSSRPEAVHEYVTPLFVSRAPNRKMSGQGHMETVKSAKRLDEGISVLRVPLTQLKLKDLEKMVNRAREPKLYEALKARLEAHKDDPAKAFAEPFYKYDKAGNRTQQVKAVRVEQVQKTGVWVRNHNGIADNATMVRVDVFEKAGKYYLVPIYSWQVAKGILPDRAVVAYADEEDWTVIDESFRFKFVLYSNDLIKVQLKKDSFLGYFSGLDRATGAISLREHDLEKSKGKDGMHRIGVKTALSFQKYQIDEMGKEIRPCRLKKRPPVR

SEQ ID NO: 1100 - protein, 1082 aa, Neisseria meningitidis
MAAFKPNPINYILGLDIGIASVGWAMVEIDEEENPIRLIDLGVRVFERAEVPKTGDSLAMARRLARSVRRLTRRRAHRLLRARRLLKREGVLQAADFDENGLIKSLPNTPWQLRAAALDRKLTPLEWSAVLLHLIKHRGYLSQRKNEGETADKELGALLKGVANNAHALQTGDFRTPAELALNKFEKESGHIRNQRGDYSHTFSRKDLQAELILLFEKQKEFGNPHVSGGLKEGIETLLMTQRPALSGDAVQKMLGHCTFEPAEPKAAKNTYTAERFIWLTKLNNLRILEQGSERPLTDTERATLMDEPYRKSKLTYAQARKLLGLEDTAFFKGLRYGKDNAEASTLMEMKAYHAISRALEKEGLKDKKSPLNLSSELQDEIGTAFSLFKTDEDITGRLKDRVQPEILEALLKHISFDKFVQISLKALRRIVPLMEQGKRYDEACAEIYGDHYGKKNTEEKIYLPPIPADKIRNPVVLRALSQARKVINGVVRRYGSPARIHIETAREVGKSFKDRKEIEKRQEENRKDREKAAAKFREYFPNFVGEPKSKDILKLRLYEQQHGKCLYSGKEINLVRLNEKGYVEIDHALPFSRTWDDSFNNKVLVLGSENQNKGNQTPYEYFNGKDNSREWQEFKARVETSRFPRSKKQRILLQKFDEDGFKECNLNDTRYVNRFLCQFVADHILLTGKGKRRVFASNGQITNLLRGFWGLRKVRAENDRHHALDAVVVACSTVAMQQKITRFVRYKEMNAFDGKTIDKETGKVLHQKTHFPQPWEFFAQEVMIRVFGKPDGKPEFEEADTPEKLRTLLAEKLSSRPEAVHEYVTPLFVSRAPNRKMSGAHKDTLRSAKRFVKHNEKISVKRVWLTEIKLADLENMVNYKNGREIELYEALKARLEAYGGNAKQAFDPKDNPFYKKGGQLVKAVRVEKTQESGVLLNKKNAYTIADNGDMVRVDVFCKVDKKGKNQYFIVPIYAWQVAENILPDIDCKGYRIDDSYTFCFSLHKYDLIAFQKDEKSKVEFAYYINCDSSNGRFYLAWHDKGSKEQQFRISTQNLVLIQKYQVNELGKEIRPCRLKKRPPVR

SEQ ID NO: 1101 - protein, 1082 aa, Neisseria meningitidis
MAAFKPNPINYILGLDIGIASVGWAMVEIDEEENPIRLIDLGVRVFERAEVPKTGDSLAMARRLARSVRRLTRRRAHRLLRARRLLKREGVLQAADFDENGLIKSLPNTPWQLRAAALDRKLTPLEWSAVLLHLIKHRGYLSQRKNEGETADKELGALLKGVANNAHALQTGDFRTPAELALNKFEKESGHIRNQRGDYSHTFSRKDLQAELILLFEKQKEFGNPHVSGGLKEGIETLLMTQRPALSGDAVQKMLGHCTFEPAEPKAAKNTYTAERFIWLTKLNNLRILEQGSERPLTDTERATLMDEPYRKSKLTYAQARKLLGLEDTAFFKGLRYGKDNAEASTLMEMKAYHAISRALEKEGLKDKKSPLNLSSELQDEIGTAFSLFKTDEDITGRLKDRVQPEILEALLKHISFDKFVQISLKALRRIVPLMEQGKRYDEACAEIYGDHYGKKNTEEKIYLPPIPADEIRNPVVLRALSQARKVINGVVRRYGSPARIHIETAREVGKSFKDRKEIEKRQEENRKDREKAAAKFREYFPNFVGEPKSKDILKLRLYEQQHGKCLYSGKEINLVRLNEKGYVEIDHALPFSRTWDDSFNNKVLVLGSENQNKGNQTPYEYFNGKDNSREWQEFKARVETSRFPRSKKQRILLQKFDEDGFKECNLNDTRYVNRFLCQFVADHILLTGKGKRRVFASNGQITNLLRGFWGLRKVRAENDRHHALDAVVVACSTVAMQQKITRFVRYKEMNAFDGKTIDKETGKVLHQKTHFPQPWEFFAQEVMIRVFGKPDGKPEFEEADTPEKLRTLLAEKLSSRPEAVHEYVTPLFVSRAPNRKMSGAHKDTLRSAKRFVKHNEKISVKRVWLTEIKLADLENMVNYKNGREIELYEALKARLEAYGGNAKQAFDPKDNPFYKKGGQLVKAVRVEKTQESGVLLNKKNAYTIADNGDMVRVDVFCKVDKKGKNQYFIVPIYAWQVAENILPDIDCKGYRIDDSYTFCFSLHKYDLIAFQKDEKSKVEFAYYINCDSSNGRFYLAWHDKGSKEQQFRISTQNLVLIQKYQVNELGKEIRPCRLKKRPPVR

SEQ ID NO: 1102 - protein, 1082 aa, Neisseria meningitidis
MAAFKPNPINYILGLDIGIASVGWAMVEIDEEENPIRLIDLGVRVFERAEVPKTGDSLAMARRLARSVRRLTRRRAHRLLRTRRLLKREGVLQAANFDENGLIKSLPNTLWQLRAAALDRKLTPLEWSAVLLHLIKHRGYLSQRKNEGETADKELGALLKGVAGNAHALQTGDFRTPAELALNKFEKESGHIRNQRGDYSHTFSRKDLQAELNLLFEKQKEFGNPHISDGLKEGIETLLMTQRPALSGDAVQKMLGHCTFEPTEPKAAKNTYTTERFIWLTKLNNLRILEQGSERPLTDTERATLMDEPYRKSKLTYAQARKLLELDDIAFFKGLRYGKDNAEASTLMEMKAYHAISRALEKEGLKDKKSPLNLSPELQDEIGTAFSLFKTDEDITGRLKDRIQPEILEALLKHINFDKFVQISLKALRRIVPLMEQGKRYDEACAEIYGDHYGKKNTEEKIDLPPIPADEIHNPVVLRALSQARKVINGVVRRYGSPARIHIETAREVGKSFKDRKEIEKRQEENRKDREKAAAKFREYFPNFVGEPKSKDILKLRLYEQQHGKCLYSGKEINLGRLNEKGYVEIDHALPFSRTWDDSFNNKVLVLGSENQNKGNQTPYEYFNGKDNSREWQEFKARVETSRFPRSKKQRILLQKFDEDGFKERNLNDTRYVNRFLCQFVADRMRLTGKGKKRVFASNGQITNLLRGFWGLRKVRAENDRHHALDAVVVACSTVAMQQKITRFVRYKEMNAFDGKTIDKETGEVLHQKTHFPQPWEFFAQEVMIRVFGKPDGKPEFEEADTPEKLRTLLTEKLSSRPEAVHEYVTPLFVSRAPNRKMSGQGHMETVKSAKRLDEGISVLRVPLTQLKLKDLEKMVNREREPKLYEALKARLEAHKDDPAKAFAEPFYKYDKAGNRTQQVKAMRVEQVQKTGVWVRNHNGIADNATMVRVDVFEKGDKYYLVPIYSWQVAKGILPDRAVVQGKDEEDWQLIDDSFNFKFSLHPNDLVEVITKKARMFGYFASCHRGTGNINIRIHDLDHKIGKNGILEGIGVKTALSFQKYQIDELGKEIRPCRLKKRPPVR

SEQ ID NO: 1103 - protein, 1082 aa, Neisseria meningitidis
MAAFKPNPINYILGLDIGIASVGWAMVEIDEEENPIRLIDLSVRVFERAEVPKTGDSLAMARRLARSVRRLTRRRAHRLLRARRLLKREGVLQAADFDENGLIKSLPNTPWQLRAAALDRKLTPLEWSAVLLHLIKHRGYLSQRKNEGETADKELGALLKGVADNAHALQTGDFRTPAELALNKFEKESGHIRNQRGDYSHTFSRKDLQAELILLFEKQKEFGNPHVSGGLKEGIETLLMTQRPALSGDAVQKMLGHCTFEPAEPKAAKNTYTAERFVWLTKLNNLRILEQGSERPLTDTERATLMDEPYRKSKLTYAQARKLLGLEDTAFFKGLRYGKDNAEASTLMEMKAYHAISRALEKEGLKDKKSPLRLSPELQDEIGTAFSLFKTDEDITGRLKDRVQPEILEALLKHISFDKFVQISLKALRRIVPLMEQGKRYDEACAEIYGDHYGKKNAEEKIYLPPIPADEIRNPVVLRALSQARKVINGVVRRYGSPARIHIETAREVGKSFKDRKEIEKRQEENRKDREKAAAKFREYFPNFVGEPKSKDILKLRLYEQQHGKCLYSGKEINLGRLNEKGYVEIDHALPFSRTWDDSFNNKVLVLGSENQNKGNQTPYEYFNGKDNSREWQEFKARVETSRFPRSKKQRILLQKFDEDGFKERNLNDTRYVNRFLCQFVADRMRLTGKGKKRVFASNGQITNLLRGFWGLRKVRAENDRHHALDAVVVACSTVAMQQKITRFVRYKEMNAFDGKTIDKETGEVLHQKTHFPQPWEFFAQEVMIRVFGKPDGKPEFEEADTPEKLRTLLAEKLSSRPEAVHEYVTPLFVSRAPNRKMSGQGHMETVKSAKRLDEGVSVLRVPLTQLKLKDLEKMVNREREPKLYEALKARLEAHKDDPAKAFAEPFYKYDKAGNRTQQVKAVRVEQVQKTGVWVRNHNGIADNATMVRVDVFEKGDKYYLVPIYSWQVAKGILPDRAVVQGKDEEDWQLIDDSFNFKFSLHPNDLVEVITKKARMFGYFASCHRGTGNINIRIHDLDHKIGKNGILEGIGVKTALSFQKYQIDELGKEIRPCRLKKRPPVR

SEQ ID NO: 1104 - protein, 1082 aa, Neisseria meningitidis
MAAFKPNSINYILGLDIGIASVGWAMVEIDEEENPIRLIDLGVRVFERAEVPKTGDSLAMARRLARSVRRLTRRRAHRLLRTRRLLKREGVLQAANFDENGLIKSLPNTPWQLRAAALDRKLTPLEWSAVLLHLIKHRGYLSQRKNEGETADKELGALLKGVAGNAHALQTGDFRTPAELALNKFEKESGHIRNQRSDYSHTFSRKDLQAELILLFEKQKEFGNPHVSGGLKEGIETLLMTQRPALSGDAVQKMLGHCTFEPAEPKAAKNTYTAERFIWLTKLNNLRILEQGSERPLTDTERATLMDEPYRKSKLTYAQARKLLGLEDTAFFKGLRYGKDNAEASTLMEMKAYHAISRALEKEGLKDKKSPLNLSPELQDEIGTAFSLFKTDEDITGRLKDRIQPEILEALLKHISFDKFVQISLKALRRIVPLMEQGKRYDEACAEIYGDHYGKKNTEEKIYLPPIPADEIRNPVVLRALSQARKVINGVVRRYGSPARIHIETAREVGKSFKDRKEIEKRQEENRKDREKAAAKFREYFPNFVGEPKSKDILKLRLYEQQHGKCLYSGKEINLGRLNEKGYVEIDHALPFSRTWDDSFNNKVLVLGSENQNKGNQTPYEYFNGKDNSREWQEFKARVETSRFPRSKKQRILLQKFDEDGFKERNLNDTRYVNRFLCQFVADRMRLTGKGKKRVFASNGQITNLLRGFWGLRKVRAENDRHHALDAVVVACSTVAMQQKITRFVRYKEMNAFDGKTIDKETGEVLHQKTHFPQPWEFFAQEVMIRVFGKPDGKPEFEEADTLEKLRTLLAEKLSSRPEAVHEYVTPLFVSRAPNRKMSGQGHMETVKSAKRLDEGVSVLRVPLTQLKLKDLEKMVNREREPKLYEALKARLEAHKDDPAKAFAEPFYKYDKAGNRTQQVKAVRVEQVQKTGVWVRNHNGIADNATMVRVDVFEKGDKYYLVPIYSWQVAKGILPDRAVVQGKDEEDWQLIDDSFNFKFSLHPNDLVEVITKKARMFGYFASCHRGTGNINIRIHDLDHKIGKNGILEGIGVKTALSFQKYQIDELGKEIRPCRLKKRPPVR

SEQ ID NO: 1105 - protein, 67 aa, Neisseria meningitidis
MFGYFASCHRGTGNINIRIHDLDHKIGKNGILEGIGVKTALSFQKYQIDELGKEIRPCRLKKRPPVR

SEQ ID NO: 1106 - protein, 220 aa, Neisseria mucosa
MRHIFSDGLKEGIETLLMTQRPALSGDAVQKMLGHCTFEPTEPKAAKNTYTAERFIWLTKLNNLRILEQGSERPLTNTERATLMDEPYRKSKLTYAQARKLLGLKDTAFFKGLRYGKDNAEASTLMEMKAYHAISRALEKEGLKDKKSPLNLSPELQDEIGTAFSLFKTDEDITGRLKTELTPASNKTLSRPFTVKSASNGSTSAPWLPSTKWFLHFKPA

SEQ ID NO: 1107 - protein, 392 aa, Neisseria sp.
MAPFTLKPLNYILGLDIGIASVGWAVVETDSDVLPYRLIDVGVRTFDRAEVPKTGESPAAARRLARSVRRMIRRRAHRMLRARRLLKREGMLQAADFDAHGLVENLPVNPWQLRVDALSRKLMPLEWAAVLLHMVKHRGYLSQRKNERNSSDKELGALLSGVAANSEALQGGDFRTPAELAVNKFEKESGHIRNQRGDYSHTFNRKDVQAELVLLFEKQKEYGNPYISDGLLTGVEDLLMTQRAALSGDAVQKMLGRCTFEPEEYKAAKNTYSAERFVWLTKLNNLRILDQGSERPLTDSERAKLMDEPYKKTKLTYAQVRRLLELDDTAFFKGLRYSKDNAESATLMEMKAYHSISGALEKAGLKNKKIAAGLIARIAGRNRRGVFAIQNR

SEQ ID NO: 1108 - protein, 701 aa, Neisseria sp.
MQDEIGEAFSLFKTDEDIRGRLKGKLPDEQLDALLEYVSFDKFVQLSLKALRKILPLMEQGKRYDEACAEIYGDHYGIKDDKQAQFLPPVSADEIRNPVVLRALSQARKVVNAVVRRYGSPARVHIETAREVGKSFLDRKKIEKRQEENRKDRERSIAKFREYFPNFVGEPKAKDILKMRLYEQQQGQCLYSGKAIDLRRLNEKGYVEIDHALPFSRTWDDSFNNKVLVLAGENQNKRNQTPFEWLGGDEKRWREFTARVEHCRFPRSKKQRILMQKLDEKDFKERNLNDTRYVNRFLCNFIAQNMLLTGEDKNRVFASNGQITNLLRGMWGLKKVRESNDRHHALDAVVVACSTVAMQQKITNYVRQKEMNVFDGEMVDKTTGEVSRLHFPQPWDFFRQEVMMRVFGKPDTPSENNEEADTPEKLRALLADKLSSRPEAVHEAVTPLFVSRAPSRKMSGQGHMETIKSAKRLSEGKSVLRVPLTQLTPKLLENMVNREREPQLYEDLLGRLNAHGGDPAKAFAAPFFKRDKAGNPTQQVKAVRVEDVQKSGVIVREGNGVADNATMVRVDVFEKGGKYYLMPIYTWQAAKGILPNKAVIAHTDEANWQEMDTSFTFKFALYPNDLVLASLKKETYFGYFAGLDRSTGNISLRVHDLEKSKGKDGVYRIGVKTALSFQKYQVDELGKTIRPCRLKKRPPVR

SEQ ID NO: 1109 - protein, 1089 aa, Neisseria sp.
MTAFKPNPLNYILGLDIGIASVGWAMVEIDDKENPVRLIDLGVRVFERAEMPKTGDSLAAARRLARSVRRLTRRRAHRLLRARRLLKHEGVLKPEDFDENGLVKPLPYIPKQPRNTPWQLRAAALDRKLTPLEWAAVLLHLVKHRGYLSQRKNEGETDDKELGALLKGVADNTHALQAGNFRTPAELALNKFEKESGHIRNQRGDYSHTFSRKDLQAELVLLFEKQKEFGNPYVSDDLKNGIENLLMTQRPALSGDAIQKMLGHCTFEPAEPKAAKNTYTAERFIWLTKLNNLRILNQGNERPLTDAERTTLMDEPYKKSKLTYAQARKLLDLDDTAFFKGLRYGKDNAESATLMEMKAYHAISRALEKEGLKDKKSPLSLSPELQDEIGTAFSLFKTDEEITGRLKGCLQPEILDALLKHISFDKFVQISLKALRRIVPLMEQGKRYDEACAEIYGDHHGRRNSEETLYLPPIPADEIRNPVVLRALSQARKVINGVGRRYGSPARIHIETAREVGKSFKDRKEIEKRQEENRKDREKAAAEFQEYFPNFVGEPKSKDILKLRLYRQQNCKCLYSGKEINLGRLNEKGYVEIDHALPFSRTWDDSFNNKVLVLGSENQNKGNRTPYEYLNGKDNSREWQEFKARVETSRFPHSKKQRILLQKFDEEGFKERNLNDTRYVNRFLCKFVADHMQLTGKGKRRVFASNGQITNLLRGFWGLRKVRAENDRHHALDAVVVACSTVAMQQRITRFVRYKEMNAFDGKTVDKETGEVLHQKTHFPQPWEFFAQEVMIRVFGKPDGKPELEEADTPEKLRALLAEKLSSRPEAVHEYVAPLFVSRAPNRKMSGQGHMETIKSPKRLDEGISVVRVPLTQLKLKDLEKMVNREREPKLYEALKARLEAHKDDPAKAFAEPFYKQDKAGNRTQQVKAVRIEQVQKTGVWVRNQNGIADNATMVRVDVFEKGGKYYLVPIYSWQVAKGILPDKAIIAFKDEEEWQLIDDSFNFKFPLHPNDLVEVITKKARIFGYFASCHRGTGNINIRIHDLDNKVGKNGILEGIGVKTALSFQKYQIDELGKEIRPCRLKKRPPVR

SEQ ID NO: 1110 - protein, 1097 aa, Neisseria wadsworthii
MKKQPQRYILGLDLGIASVGWALILVDGAENPVGLLDCGVRTFERAEVPKTGDSLALARRQARSVRRLIRRRAHRLLRLRRLLKREGILSAADFNSDGLPNLPIDAWQLRVAGLERKLTNQEWAAVLLHLVKHRGYLSQRKSETQTENKELGRLLAGVAENSKLLSESSEQYRTPAELAVKLFAEQSGHLRNKGGEYTHTFNRLDLQKELHLLFERQYALGNPFASAELQSKVDELLMTQRSALQGEAVLKMLGKCTFEPSEYKAAKNTYSAERFIWLTKLNNLRILYNGEERALDEGDRKKLLDEPYKKAKLTYKQVRSILNLPESAVFKGLRYGKDSDGLKAENGTLMEMKAYHKIRTILDKAGLKGEWENRIRNPEILDKIGTAFSLYKTDEDIQAALADLRLPENVLDALLAGLNFDKFIQLSLKALRNILPLMERGIRYDEACKEVYGDHRALAESKNQVLLPPIPADEIRNPVVLRTLTQARKVINAIIRRYGSPQRVHIETARELGKSKQERDKIDRKNKENQNDRNRLASDIRKHFNFEPTPKDILKLRLYEQQHGKCLYSDLREEKGECLYTGNVIELHRLFEDGYVEIDHALPLSRTWDNSLNNKVLVLKSSNQNKGNKTPYEWLDGANNSRRWREFQARVQGCHFPYVKKQRIQTAKLDSKAEQGFLERNLNDTRYISKFMCQFITANLRLAETSNALMEEVAGENPYWKERKRQRVFAPSGSIIALLRGLWGLKKVREDNDRHHALDAIVVACSTVSMQQKITKAMQRRETLETVDSETGEVKTRIPQPWDFFRQEVMIRVFSDSPREELAEKLNSRPEALHDFVSPLFVSRAPNRKMTGQGHLETVKSAKRLSENISVVRKPLTALKLKDIENIVGYPDREPALYQALRERLLAHKDDPVKAFADKPFYKPAKDGGQGSLVKAVRIIENTKHGLKIRNGITDTNGDMVRTDVYQKTDKKGKRQYFIVPVYAWQVEKNELPTVDCKGYEIDDNYEFCFSLYKYDLIEIQNPNDINQELRAYYINCDSSDGRFWLAYHDKSAKEQQFRISTQNQPIIKKYQVDTLGKEIRLCKAEKRTALNGKKKK

SEQ ID NO: 1111 - protein, 1426 aa, Niabella soli
MPRKNILGLDLGTTSIGFAKIIEDDDYQCSSVELIGVRVNPLTTDEQTNFEKGKPVSVNADRTLKRGMRRNLDRYQLRRDYLIEILRTHHIITADTKLAEDGKNTTHTTYALRALAATAEIPLEAFVRVLLAINKKRGYKSSRKAKNEDEGQLIDGMAIARRLYEESLTPGQFSYQLLKEGKKYLPDFYRSDLNTELNKVWNFQKQFYPEILTDEFKRHLEGKGQRATAVAFWGQHGFSMAENKGSREEKKLHAYKWRSEAAHKQLTKEEVAFVITEINNDLNKSSGYLGAISDRSKELFFNKQTVGQYLHQQLKENPHTRLKGQVFYRQDYLDEFETIWEMQAKFYSALTLELKEEVRDVVIFYQRKLKSQMGLISLCEFESKEIEIEKNGEKAKKRIGLRVAPKSSPLFQEFKIWQVLNNLEFRNKKTKEVFVPEMAAKQQLFDELNIKGNLLASEAIKILGYKTKDWEANYHTLEGNRTNKSLYDAWLKILELEGYDENLLKLSGSDDIDVSKIEKPALEIRQMVLAVFEVLGISGAILDFDAEADGKAFEQQPAYQLWHLLYSAEDDGKKYSQEDIFTYGHDNIGLKKKLCEKFGFRPEHTKILVNVVFSDDYGNLSSKAMRRIYPFIKELTYDKACAEAGYRHSAASLTKEEIAARPLQNRLDLLKKNELRSPVVEKILNQMVNVVNTLVDDENQNRKARGLSEDFHFDEIRIELARELKKNAKERAEMTTNINTAKQSHEKIIRILQTEFGVPNPSRNDIVRYKLYEELKNNGYKDLYTNTYISRDILFSKQIDVDHIIPQMSLFDDSFSNKTVVFRKDNQDKGNKTAYDYILGKYGEQALEEYISRITSLFELGKKNKEEGIGKAKFQKLQKRLVDIGDGFIERDLRESQYIAKKANNMLYAICRSVVSTSGEITARLREDWDLVNVMQEINLPKFRALGLTEMVEKKDGAQKERITDWTKRNDHRHHAMDALAIAFTRHSHIQYLNHLNARKDEANKWHPVVSKIEEKETVLIYDDLGNRKRKFKAPMPNFREVVKEHLENVLISHKAKNKVVTKNKNKIKTVRGEKVKTELTPRGQLHKETIYGRYRYYESKEEKIGPKFDAEMIGMVTNPQYKKLLLERLAANGNDPKKAFWGKNALNKNPLYVDEARQELLPEKILLRWLNDDYSIRKDVTPENLKDIKTIEKILDKGVKKILLKRLADFGNDPKKAFSDLDKNPIWQNEAKRIAIKRVTISGIKNAAPLHHKKDHLGNDILDEKGKQIPSSFVSTGNNHHVAIYRDAEGNLQERVVSLFDAVQLVNGGEPVIDKEYNKGIGWQFLFTMKQNEMFVFPDEKTGFNPREVDLLSSGNRKLISPNLFRVQKLASKNYFFRHHLETSVEEKKELKNIAYKPQLGLNALSNIVKVRINHIGEIVSVGEY

SEQ ID NO: 1112 - protein, 79 aa, Nitritalea halalkaliphila
MPLRLPERVYKMISSTGAECHFLPVNVSSLIKGYDAKSKLGEFGSQNKQEVTSDSFIRVKERCYKLEINRLGIPLNRLK

SEQ ID NO: 1113 - protein, 1498 aa, Odoribacter laneus
METTLGIDLGTNSIGLALVDQEEHQILYSGVRIFPEGINKDTIGLGEKEESRNATRRAKRQMRRQYFRKKLRKAKLLELLIAYDMCPLKPEDVRRWKNWDKQQKSTVRQFPDTPAFREWLKQNPYELRKQAVTEDVTRPELGRILYQMIQRRGFLSSRKGKEEGKIFTGKDRMVGIDETRKNLQKQTLGAYLYDIAPKNGEKYRFRTERVRARYTLRDMYIREFEIIWQRQAGHLGLAHEQATRKKNIFLEGSATNVRNSKLITHLQAKYGRGHVLIEDTRITVTFQLPLKEVLGGKIEIEEEQLKFKSNESVLFWQRPLRSQKSLLSKCVFEGRNFYDPVHQKWIIAGPTPAPLSHPEFEEFRAYQFINNIIYGKNEHLTAIQREAVFELMCTESKDFNFEKIPKHLKLFEKFNFDDTTKVPACTTISQLRKLFPHPVWEEKREEIWHCFYFYDDNTLLFEKLQKDYALQTNDLEKIKKIRLSESYGNVSLKAIRRINPYLKKGYAYSTAVLLGGIRNSFGKRFEYFKEYEPEIEKAVCRILKEKNAEGEVIRKIKDYLVHNRFGFAKNDRAFQKLYHHSQAITTQAQKERLPETGNLRNPIVQQGLNELRRTVNKLLATCREKYGPSFKFDHIHVEMGRELRSSKTEREKQSRQIRENEKKNEAAKVKLAEYGLKAYRDNIQKYLLYKEIEEKGGTVCCPYTGKTLNISHTLGSDNSVQIEHIIPYSISLDDSLANKTLCDATFNREKGELTPYDFYQKDPSPEKWGASSWEEIEDRAFRLLPYAKAQRFIRRKPQESNEFISRQLNDTRYISKKAVEYLSAICSDVKAFPGQLTAELRHLWGLNNILQSAPDITFPLPVSATENHREYYVITNEQNEVIRLFPKQGETPRTEKGELLLTGEVERKVFRCKGMQEFQTDVSDGKYWRRIKLSSSVTWSPLFAPKPISADGQIVLKGRIEKGVFVCNQLKQKLKTGLPDGSYWISLPVISQTFKEGESVNNSKLTSQQVQLFGRVREGIFRCHNYQCPASGADGNFWCTLDTDTAQPAFTPIKNAPPGVGGGQIILTGDVDDKGIFHADDDLHYELPASLPKGKYYGIFTVESCDPTLIPIELSAPKTSKGENLIEGNIWVDEHTGEVRFDPKKNREDQRHHAIDAIVIALSSQSLFQRLSTYNARRENKKRGLDSTEHFPSPWPGFAQDVRQSVVPLLVSYKQNPKTLCKISKTLYKDGKKIHSCGNAVRGQLHKETVYGQRTAPGATEKSYHIRKDIRELKTSKHIGKVVDITIRQMLLKHLQENYHIDITQEFNIPSNAFFKEGVYRIFLPNKHGEPVPIKKIRMKEELGNAERLKDNINQYVNPRNNHHVMIYQDADGNLKEEIVSFWSVIERQNQGQPIYQLPREGRNIVSILQINDTFLIGLKEEEPEVYRNDLSTLSKHLYRVQKLSGMYYTFRHHLASTLNNEREEFRIQSLEAWKRANPVKVQIDEIGRITFLNGPLC

SEQ ID NO: 1114 - protein, 1389 aa, Oenococcus kitaharae; identical to SEQ ID NO: 236

SEQ ID NO: 1115 - protein, 1535 aa, Ornithobacterium rhinotracheale
MNTILGLDLGTNSIGWALIKVLNDKTRLPLEIIDLGVVVIPTDQRTLDKFSKGESISKTAERTKQKGVRKLYERKKLRRERLHRVLNILGFLPEHYSKKIDFKKHLGQFFGNSQPKISYVENDHGKHEFIFMDSYREMLKEFSKHNIKNVPYDWTIYYLRKKALSQKISKEELAWVILNFNKKRGYYQFRDDNADENKENKIEKYYALKVTNVKKEDAQNYTITLENGWIYKNKSKISLLDWVGSTKEFISTEKFDNKGNIIKKKNGEDDRTLKLVDSEKDWIAIKKSTEDRIENYGKTVGTYLYEHLLKDPNQKLNGELINIIDRKFYKNELKQILEKQKEFHPELLNEDLFQKSIIELYPKNSTRQKELKNKDLCYLLIDDVIYYQRDLKKKNSTINKCSFESREYYLNGEKQIQKINCIAKSKPLYQEFRTLQFIKNLKVYEIIDGLEKDITSKLLPDFETKEHFFEWLNDKEKIDQLQLLSYKCFDLHDNVKNDLIAKGIKRPTEKAIRTELLEKYRWNYSKDNDRNFLLNETRFKILKYLKKVDKKLTLTNEQIESLWLLLYSAKDERELKNGLQKFSEKNKLPKKFSDIFISFPPFKKEYGAYSEKALKKLLSLVRFGKYWSFNKIDNNIQNKIMNILNGEVDDSISDRVREKTILLQDKNDFQDLPLWLASYVAYNRFSEVSEIKYWDSPDKIEFLKQHSIGNPIVEKIINETLKLIKDIWVIHGKSCKNFFSEIHIELSREIKSSSKKRAQITNNNTKNQKLNNLIKSLLIEMASDTKYENVTPYSPSQQEILKIYDEGIYSKEENSEKIKEINKIRNNNKISKSDITKYKLWLEQGYISPYTGKIIPLTKLFTAKYQKEHIIPQTKFFDDSFNNKVICEAEVNKLKDNSLAMNFIKAKGGKAVKLSDGETVTILNQEEYKQLVRTSFKKNSIKLRNLLLEEIPDTFTKRQLNDTKYISKLVLSLLSNIVREKGELESTAKRIVSTNGQITSILRNDWGLNNIWNKLITPRFERLNNINKNKIYGNWENKKGKNVFQINYLNDNLSTLNTKRIDHRHHALDALIVACTTRNHINFLNNQYAKSRNQRHDLRAKLKRRETITTEGSKKQVFKDFIKPWESFTQDALKKLETTIVNFKVNKRIINKTINWYKKWEKQKDGTYKKIQKKQTKGDAWAIRKPLHIDTIYGIVCKKLPLKSALENYKNIIDENLKHKIKELKEVNKFDNNQIINFFKECNFIFEDNNIQKVEVYDFKDNRDKTILSSSRQLIDESFTPKKIGKVLDPTIRNILLKHLNSTKYNNKFDSDGNPIKPEKLAFSPEGLKDLNKNIKHLNNNKEHQPIKRVKLFETLGNKIKVGYTQQKNKKFAETATGTNLFLGIYSDNNKRDFKTIPLILAIQREKEGLNPCPDTDEKGNQLLFSLSPNELVFVPNNEERKNPNLVDFENLSKDQIDRIYKFVSCTGSEAYFVPSRTAKPIIENENGTNNKSQRIIEFNEKTSIKNEKNEPVLIKTICWKIEVNRLGKIIKVIK

SEQ ID NO: 1116 - protein, 103 aa, Parabacteroides merdae
MIVYRLFYRFLFKATKLVNFVIHKELKRQIARTGKIKFHSGGCGCQSGNYKMQNFEKGKSITTNADRTLKRSMRRNLYRCKLRRDVLIELLKKVGFIPEKQWK

SEQ ID NO: 1117 - protein, 82 aa, Parabacteroides merdae
MSIWKLQYPPLDLKIYNKFLVYSRVNPLTVDEMQNFEKGKSITTNADRTLKRSMRRNLQRYKLRRDVLIELLKKVGFMSEKQ

SEQ ID NO: 1118 - protein, 84 aa, Parabacteroides merdae
MSIWKLQYPPLDLKIYNKFLVYSRVNPLTVDEMQNFEKGKSITTNADRTLKRSMRRNLYRCKLRRDVLIELLKKVGFIPEKQWK

SEQ ID NO: 1119 - protein, 398 aa, Pasteurella bettyae
MLANENQNKGNLTPYEWLDGKNNSKRWQDFVARVQTCCFSHRKKQHILSHKLDEKSFIERNLNDTRYVARFLCNFIADNMLLTGKGKRKVFASNGQITALLRGRWGLQKVRDDNDRHHALDAVVIACSTVAMQQKITRFVKYEEGNVFSGERIDRETGEIIPLYFPTPWKFFKENVEIRIFSENPKLELENRLPDYPQYNHEFVQPLFVSRMPTRKMTGQGHMETIKSAKRLDEGISVLKVPLTQLKLADLENMVNRERELALYEALKERLELFGNDPAKAFIEPFYKKGGALVKAVRVKKVQKSGVLVRDGNGVADNALMVRVDVFTKGGKYFLVPIYTWQVAKGILPNKAVTANIDEIDWLEMDESYQFIFTMYPNDLVKVKLKKEEFFGYYGGLD

SEQ ID NO: 1120 - protein, 610 aa, Pasteurella bettyae
MNMLKPLNYILGLDLGIGSVGWAVVEIDEQGNPLRLIDVGVRTFERAEVAKTGESLALARRLARSSRRLVKRRAARIKKAKRLLKAENILLSVDEILPNDVWQLRVKGLDHKLERQEWAAVLLHLLKRRGYLSQRKNESKSENKELGALLSGVVTNHQILQTDEYRTPAEIAVHKFQAEDGHIRNQRGDYTHTFSRLDLLAEMELLFQRQTELGNLHTSSKLLENLTALLMWQKPALAGEAILKMLGKCTFEPTEYKAAKNSYSAERFVWLTKLNNLRILEQGAERALTDSERFVLLDQPYEKAKLTYAQVRTLLKLSDEAIFKGVRYQGEDKKTVESKTTLMEMKAYHQIRKALDGADLKDEWNTLKNDSALLDEIGTAFSLYKTDDDISHYLGGKLSEKVLNVLLENLNFDKFIQLSLKALQKILPLMLQGQRYDEAVSAVYGDHYGKKSAESCRLLPAIPANEIHNPVVLRTLTQARKVINAVVRLYGSPARIHIETGRKVGKSYQDRKKLEKQQEENREQRESAVKKFKEYFPNFVGEPKGKDILKLRLYELQQSKCLYSGKSFDPNRLLEKGYVEVDHALPFSRTWDDSFNNKVCLPMKTRIKAI

SEQ ID NO: 1121 - protein, 199 aa, Pasteurella multocida
MACATPSMQQKITRFIRFKEVHPYKIENRYEMVDQESGEIISPHFPEPWAYFRQEVNIRVFDNHPDTVLKEMLPDRPQANHQFVQPLFVSRAPTRKMSGQGHMETIKSAKRLAEGISVLRIPLTQLKPNLLENMVNKEREPALYAGLKARLAEFNQDPAKAFTTPFYKQGGQQVKAIRVEQVQKSGVLVRENNGVADNA

SEQ ID NO: 1122 - protein, 63 aa, Pasteurella multocida
MQTTNLSYILGLDLGIASVGWAVVEINENEDPIGLIDVGVRIFERAEVPKTGESLALSRRLAR

SEQ ID NO: 1123 - protein, 1058 aa, Pasteurella multocida
MQTTNLSYILGLDLGIASVGWAVVEINENEDPIGLIDVGVRIFERAEVPKTGESLALSRRLARSTRRLIRRRAHRLLLAKRFLKREGILSTTDLEKGLPNQAWELRVAGLERRLSAIEWGAVLLHLIKHRGYLSKRKNESQTNNKELGALLSGVAQNHQLLQSDDYRTPAELALKKFAKEEGHIRNQRGAYTHTFNRLDLLAELNLLFAQQHQFGNPHCKEHIQQYMTELLMWQKPALSGEAILKMLGKCTHEKNEFKAAKHTYSAERFVWLTKLNNLRILEDGAERALNEEERQLLINHPYEKSKLTYAQVRKLLGLSEQAIFKHLRYSKESAESATFMELKAWHAIRKALENQGLKDTWQDLAKKPDLLDEIGTAFSLYKTDEDIQQYLEGKLPDSVINALLVSLNFDKFIELSLKSLRKILPLMEQGKRYDQACHEIYGHHYGEKNQQISQLLPVIPTQEIRNPVVLRTLSQARKVINAIIRQYGSPARVHIETGRELGKSFKERREIQKQQEDNRTKRESAVQKFKELFSDFSSEPKSKDILKFRLYEQQHGKCLYSGKEINIHRLNEKGYVEIDHALPFSRTWDDSFNNKVLVLASENQNKGNQTPYEWLQGKINSERWKNFVALVLGSQCSAAKKQRLLTQVIDDNKFIDRNLNDTRYIARFLSNYIQENLLLVGKNKKNVFTPNGQITALLRSRWGLIKVRENNDRHHALDAIVVACATPSMQQKITRFIRFKEVHPYKIENRYEMVDQESGEIISPHFPEPWAYFRQEVNIRVFDNHPDTVLKEMLPDRPQANHQFVQPLFVSRAPTRKMSGQGHMETIKSAKRLAEGISVLRIPLTQLKPNLLENMVNKEREPALYVGLKARLAEFNQDPAKAFATPFYKQGGQQVKAIRVELVQKSGVLVRQGNGVADNAPGSIVRTDVFIKNNKFFLVPIYTWQVAKGILPNKAIVAHKNEDEWEEMDEGAKFKFSIFPNDLIELRTKTECFLGYYIGPDRHNGSISLREHDSEISKGNAGVYRVGVKLALSLEKYHIDELGKNRRICRPHQRRPVR

SEQ ID NO: 1124 - protein, 1056 aa, Pasteurella multocida
MQTTNLSYILGLDLGIASVGWAVVEINENEDPIGLIDVGVRIFERAEVPKTGESLALSRRLARSTRRLIRRRARRLLLAKRFLKREGILSTTDLEKGLPNQAWELRVAGLERRLSAIEWGAVLLHLIKHRGYLSKRKNESQTNNKELGALLSGVAQNHQLLQSDDYRTPAELALKKFAKEEGHIRNQRGAYTHTFNRLDLLAELNLLFAQQHQFGNPHCKEHIQQYMTELLMWQKPALSGEAILKMLGKCTHEKNEFKAAKHTYSAERFVWLTKLNNLRILEDGAERALNEEERQLLINHPYEKSKLTYAQVRKLLGLSEQAIFKHLRYSKENAESATFMELKAWHAIRKALENQGLKDTWQDLAKKPDLLDEIGTAFSLYKTDEDIQQYLTNKVPNSVINALLVFLNFDKFIELALKSLRKILPLMEQGKRYDQACREIYGHHYGEANQKTSQLLPAIPAQEIRNPVVLRTLSQARKVINAIIRQYGSPARVHIETGRELGKSFKERREIQKQQEDNRTKRESAVQKFKELFSDFSSEPKSKDILKFRLYEQQHGKCLYSGKEINIHRLNEKGYVEIDHALPFSRTWDDSFNNKVLVLASENQNKGNQTPYEWLQGKINSERWKNFVALVLGSQCSAAKKQRLLTQVIDDNKFIDRNLNDTRYIARFLSNYIQENLLLVGKNKKNVFTPNGQITALLRSRWGLIKIRENNDRHHALDAIVVACATPSMQQKITRFIRFKEVHPYKIENRYEMVDQESGEIISPHFPEPWAYFRQEVNIRVFDNHPDTVLKEMLPDRPQANHQFVQPLFVSRAPTRKMSGQGHMETIKSAKRLAEGISVLRIPLTQLKPNLLENMVNKEREPALYAGLKARLAEFNQDPAKAFTTPFYKQGGQQVKAIRVEQVQKSGVLVRENNGVADNASIVRTDVFIKNNKFFLVPIYTWQVAKGILPNKAIVAHKNEDEWEEMDEGAKFKFSLFPNDLVELKTKKEYFFGYYIGLDRATGNISLKEHDGEISKGKDGVYRVGVKLALSFEKYQVDELGKNRQICRPQQRQPVR

SEQ ID NO: 1125 - protein, 134 aa, Pasteurella multocida
MVNKEREPALYAGLKARLAEFNQDPAKAFTTPFYKQGGQQVKAIRVEQVQKSGVLVRENNGVADNASIVRTDVFIKNNKFFLVPIYTWQVAKGILPNKAIVAHKNEDEWEEMDEGAKFKFSLFPNDLVELKTKK

SEQ ID NO: 1126 - protein, 53 aa, Pasteurella multocida
YSKENAESATFMELKAWHAIRKALENQGLKDTWQDLAKKPDLLDEIGTAFSLL

SEQ ID NO: 1127 - protein, 1366 aa, Pediococcus acidilactici
MGDRKYNLGLDIGTSSIGFAAVDENNQPIRVKGKTAIGVRLFEEGKTAADRRGFRTTRRRLSRRRWRINLLNEIFDAHLAEVDPTFLARLKESNRSNLDPKKSFQGSLLFPERKDYQFYEEYPTIYHLRKALMEEDRKFDIREIYLAVHHIIKYRGNFLNGTPMRSFKVENIELDTLFDQLNQLYAEIVPDNELAFDLAQVADVKDVLSSTTIYKMDKKKQLVKMMLLPASNKALQSENKKIVTQFVNAILNYKFKLDVLLQVETDADWSLKLNDEGADDKLEEFTGDLDENRLEIIDLLQRLHNWFSLNEITKDGNSLSAAMVEKYENHHHHLGLLKKVIENHPDAKKAKALKETYTAYVGKTDDKTQNQDDFYKAVEKNLDDSPDAKEIKRLIQLDQFMPKQRTGQNGAIPHQLHQQELDQIIEKQSKYYPFLAEPNPNVKRRKDAPYKLDELIAFKIPYYVGPLVTPEEQAQNKENVFAWMKRKAAGPITPWNFDEKVDRMESANRFIRRMTTKDTYLFGEDVLPAESMIYQKFVVLNELNNLKINGRHLSLKDKQDVYNDLFKQQKTVSIKALQNYYVTKKKAATAPTVGGLADPKKFLSSLSTYIDFKNMFGERVNDPQFQEDLEQIVEWSTIFEDRGIFKAKLQALGWLSEKQIQQLVAKRYKGWGRLSKKLLTGLKNAEGYSILDEMWRSTENFMQIQTRPEFAALIQQANEKQFEGNDPNNVWENIESILGDAYTSPQNKKAIRQVVKVVQDIEKAVGNPPEKIAIEFTREAAANPQRTQSRLRTLEKLYESAEEVVDAGLTAELAEFKENKHVLSDKYYLYFTQLGRDVYTGDTISLDKLNDYDVDHILPQSFIKDDSLDNRVLTIRAVNNGKSDNVPAKMFGKKMGSFWRYLLDNGMISKRKYNNLITDPDNISKYAQKGFINRQLVETSQVIKLTANILNGIYDKDTEIIEVPAKMNSQMRKMFDLVKVREVNDYHHAFDAYLTIFIGKYLYKCYPKLRPYFVYGKFKKFGDNEDIEVGDGRFNFLNRIERLKNVTDPETGEILWSNVAPNETIKQIKKVYNYKFMLVSRETTTRRAELFNQTVYPKNYRGKLIPIKEDRPTDLYGGYSGNTDAYLAIVALEDKKKGKYFKVVGIPTRAAAKLEKLKQQDSQQYLQALHKVIAPQFTKSTKKGIKKTEFEIVLDKVHYRQLVQDGPVKMMLGSSTYKYNAKQLVLSEKALQVIADDRKFDETQKDDNLIAVYDEILSIVNQSFDLYDINGFRKKLNDNRDQFIDLPAETKYEGRKVVAHGKREMILEILKGLHANAAFGNLKPIGFSTAFGQLQVPNGIILSKNAILIHQSPSGLFERKIKLSDL

SEQ ID NO: 1128 - protein, 1229 aa, Pediococcus acidilactici; identical to SEQ ID NO: 125

SEQ ID NO: 1129 - protein, 270 aa, Pediococcus lolii
LFNQTIYSAKASKTMIPIKNDRPTKLYGGYSGNEDAYMSIIRLSDKKKTYKVVGISMRDASKLKAYENNAHEEYLKKLKEVIEQQFLDSGKKTKADFEIVIPKVNYHQRMQDGTKQFRIGSSKYVHNTKQLVLSEKTLKAIRNNKQYNGDAEKDLINAFDEILTIVNDSFSIFDIRSFRKKLNESRDKFVSLPVEDTKEKSKVIKGKRETLKQILIALHANGTSQDIPQLGLKSFGKMVKTGGLTLSENTALIHQSPSGLFEHKIKLSDL

SEQ ID NO: 1130 - protein, 1016 aa, Pediococcus lolii
MNGIFDAHLAEVDPTFLARLKESNRSNLDPKKSFQGSLLFPERKDYQFYKEYPTIYHLRKALMEKDRKFDIREIYLAVHHIIKYRGNFLNGTPMRSFKVENIELDTLFDRLNQLYEEIIPDNELAFDLEQVADVKEVLSSTTIYKMDKKKQLVKMMLLPASNKALQSENKKIVTQFVNAILNYKFKLDVLLQVETDADWSLKLNDEGADDKLEEFTGDLDENRLEIIDLLQRLHNWFSLNEITKDGNSLSAAMVEKYKDHRHHLELLKKVIEDHSDAKKAKALKETYTAYVGKTDDKTQNKDDFYKAVEKNLDDSPEAKEIKRLIQLDQFMPKQRTGQNGAIPHQLHQQELDQIIEKQSKYYPFLAEPNPNVKRRKDAPYKLDELIAFKIPYYVGPLVTPEEQAQNKENVFAWMKRKAAGPITPWNFDEKVDRMESANRFIRRMTTKDTYLFGEDVLPAESMIYEKFVVLNELNNLKINGRHLSLKDKQDIYNDLFKQQKTVSIKALQNYYVTKKKAATAPTVGGLADPKKFLSSLSTYIDFKNMFGERVNDPQFQEDLEQIVEWSTIFEDRGIFKAKLQALGWLSEKQIQQLVAKRYKGWGRLSKKLLTGLKNAEGYSILDEMWHSTENFMQIQTRPEFAALIQQANEKQFEGNDPDNVWENIENILGDAYTSPQNKKAIRQVVKVVQDIEKAVGNPPEKIAIEFTREAAANPQRTQSRLRTLEKLYESAEEVVDAGLTAELAEFKENKHVLSDKYYLYFTQLGRDVYTGDTISLDRLNDYDVDHILPQSFIKDDSLDNRVLTIRAVNNGKSDNVPAKMFGKKMGSFWRYLLDNGMISKRKYNNLITDPDNISKYAQKGFINRQLVETSQVIKLTANILNGIYDKDTEIIEVPAKMNSQMRKMFDLVKVREVNDYHHAFDAYLTIFIGNYLYKCYPKLRPYFVYDNFKKFGNKEDIGHKRFNFLGKIERDKKVVAPETGEILWSNVAPNETIKQIKKVYDYKFMLTSHETYTKHG

SEQ ID NO: 1131 - protein, 1333 aa, Planococcus antarcticus
MKNYTIGLDIGVASVGWVCIDENYKILNYNNRHAFGVHEFESAESAAGRRLKRGMRRRYNRRKKRLQLLQSLFDSYITDSGFFSKTDSQHFWKNNNEFENRSLTEVLSSLRISSRKYPTIYHLRSDLIESNKKMDLRLVYLALHNLVKYRGHFLQEGNWSEAASAEGMDDQLLELVTRYAELENLSPLDLSESQWKAAETLLLNRNLTKTDQSKELTAMFGKEYEPFCKLVAGLGVSLHQLFPSSEQALAYKETKTKVQLSNENVEEVMELLLEEESALLEAVQPFYQQVVLYELLKGETYVAKAKVSAFKQYQKDMASLKNLLDKTFGEKVYRSYFISDKNSQREYQKSHKVEVLCKLDQFNKEAKFAETFYKDLKKLLEDKSKTSIGTTEKDEMLRIIKAIDSNQFLQKQKGIQNAAIPHQNSLYEAEKILRNQQAHYPFITTEWIEKVKQILAFRIPYYIGPLVKDTTQSPFSWVERKGDAPITPWNFDEQIDKAASAEAFISRMRKTCTYLKGQEVLPKSSLTYERFEVLNELNGIQLRTTGAESDFRHRLSYEMKCWIIDNVFKQYKTVSTKRLLQELKKSPYADELYDEHTGEIKEVFGTQKENAFATSLSGYISMKSILGAVVDDNPAMTEELIYWIAVFEDREILHLKIQEKYPSITDVQRQKLALVKLPGWGRFSRLLIDGLPLDEQGQSVLDHMEQYSSVFMEVLKNKGFGLEKKIQKMNQHQVDGTKKIRYEDIEELAGSPALKRGIWRSVKIVEELVSIFGEPANIVLEVAREDGEKKRTKSRKDQWEELTKTTLKNDPDLKSFIGEIKSQGDQRFNEQRFWLYVTQQGKCLYTGKALDIQNLSMYEVDHILPQNFVKDDSLDNLALVMPEANQRKNQVGQNKMPLEIIEANQQYAMRTLWERLHELKLISSGKLGRLKKPSFDEVDKDKFIARQLVETRQIIKHVRDLLDERFSKSDIHLVKAGIVSKFRRFSEIPKIRDYNNKHHAMDALFAAALIQSILGKYGKNFLAFDLSKKDRQKQWRSVKGSNKEFFLFKNFGNLRLQSPVTGEEVSGVEYMKHVYFELPWQTTKMTQTGDGMFYKESIFSPKVKQAKYVSPKTEKFVHDEVKNHSICLVEFTFMKKEKEVQETKFIDLKVIEHHQFLKEPESQLAKFLAEKETNSPIIHARIIRTIPKYQKIWIEHFPYYFISTRELHNARQFEISYELMEKVKQLSERSSVEELKIVFGLLIDQMNDNYPIYTKSSIQDRVQKFVDTQLYDFKSFEIGFEELKKAVAANAQRSDTFGSRISKKPKPEEVAIGYESITGLKYRKPRSVVGTKR

SEQ ID NO: 1132 - protein, 211 aa, Porphyromonas catoniae
MGKKVLGLDLGVGSIGWCLITLDKDEKPQSILGMGSRIVPLSADDATEFTQGKAITKNKMRTVARTIRKGMDRYQLRREALKKVLREHAMLPDEALIKLPLLELWELRARAATPGEQVSLTELGRVLLHINQKRGYKHAKADEAAEAETKKGKETGYVAQVKGRYQILKEKGLTIGQHFAGELRANQQTAPRGTYYTYRIKEQVYPRVRGV

SEQ ID NO: 1133 - protein, 1009 aa, Porphyromonas catoniae
MRIIREAYIEEYDRIMAVQRVFYPELLTDALIGRIRDRIIFYQRPLKSCKQLVSFCEFEKKEKVIRVKHTNKEGVQELVEKTITIGPKVAPKSSPIFQVCKVWESIHNIRLYHPDGTERKLEQEEKQKLFDYLQRNDKLSLTTLRKELKIKPKDKLWCDKLLEKGIAGNTTAAILRKAFKGYEHYERLFRFDLVRRDSHEADEDGVIRPIIDESYQNEPLYKLWHILYSIEDRAEMRSALIGQLGIKAEDLDNGLMDALYKIDFVKQGYGNKSAKFICKLLPHLQEGKMYSEAAEAAGMRHSDSMTAQERDERNLLEEIPLLQKNALRQPVVEKVLNQMINLVNALKREHGEIDEVRVELARELKMSREEREKATKNNSSREKENKAIAERITEYGLTPTKSRIQKYRLWQESAESCIYCGKRVDVVQFLRGEETEVEHIIPKSILFDDSLSNKACACRSCNQEKGNRFAMEYIQAKGWEQDYIERVDSLFHDKKISYSKRQHLLMLPKDLPEDFIERHLRLSQYISREAQGILRKGIRLVSASEGGVTAKLRQLWGYDNILRDLNLERYKSMGETEVVTVEHRDGQRTDERIKDWSKRKDHRHHAIDALVVACTRQSYIQRLNRVNAEADRQEMDAFIKEQQQEHKLSKKEKLSLLENWLKEQPHFTTGEVKEHAEGILISFRPGKRTVSRGRNIYKRSGKTDVQRNVLIPRGALSEETVYGVISVDGENKVVCKYPLQKFLDTKETNVDKIADQAAEKIVDKVLREKIRERIKRYGKKEAFAEPLYLDEAQTQVVRSVRCFISKDQAKLIPLRYNDESEAVGFVAPGNNHHLALYRDASGKMRASVVSFFAAVERARYGIPMIVLNPRETREKARIIPDLPESIFSKLPEEDWVLEETLQEGEMVLLGMENDAIEEAIKKKDYSKLSRYLYRVQSLSYNDYKFCFHLETESEKKEKKKGEDKKRGEKAKNTAVMPPKRYRIRCLATYQEDLNPRKVKIDLLGRISLA

SEQ ID NO: 1134 - protein, 1197 aa, Porphyromonas sp.
MLMSKHVLGLDLGVGSIGWCLIALDAQGDPAEILGMGSRVVPLNNATKAIEAFNAGAAFTASQERTARRTMRRGFARYQLRRYRLRRELEKVGMLPDAALIQLPLLELWELRERAATAGRRLTLPELGRVLCHINQKRGYRHVKSDAAAIVGDEGEKKKDSNSAYLAGIRANDEKLQAEHKTVGQYFAEQLRQNQSESPTGGISYRIKDQIFSRQCYIDEYDQIMAVQRVHYPDILTDEFIRMLRDEVIFMQRPLKSCKHLVSLCEFEKQERVMRVQQDDGKGGWQLVERRVKFGPKVAPKSSPLFQLCCIYEAVNNIRLTRPNGSPCDITPEERAKIVAHLQSSASLSFAALKKLLKEKALIADQLTSKSGLKGNSTRVALASALQPYPQYHHLLDMELETRMMTVQLTDEETGEVTEREVAVVTDSYVRKPLYRLWHILYSIEEREAMRRALITQLGMKEEDLDGGLLDQLYRLDFVKPGYGNKSAKFICKLLPQLQQGLGYSEACAAVGYRHSNSPTSEEITERTLLEKIPLLQRNELRQPLVEKILNQMINLVNALKAEYGIDEVRVELARELKMSREERERMARNNKDREERNKGVAAKIRECGLYPTKPRIQKYMLWKEAGRQCLYCGRSIEEEQCLREGGMEVEHIIPKSVLYDDSYGNKTCACRRCNKEKGNRTALEYIRAKGREAEYMKRINDLLKEKKISYSKHQRLRWLKEDIPSDFLERQLRLTQYISRQAMAILQQGIRRVSASEGGVTARLRSLWGYGKILHTLNLDRYDSMGETERVSREGEATEELHITNWSKRMDHRHHAIDALVVACTRQSYIQRLNRLSSEFGREDKKKEDQEAQEQQATETGRLSNLERWLTQRPHFSVRTVSDKVAEILISYRPGQRVVTRGRNIYRKKMADGREVSCVQRGVLVPRGELMEASFYGKILSQGRVRIVKRYPLHDLKGEVVDPHLRELITTYNQELKSREKGAPIPPLCLDKDKKQEVRSVRCYAKTLSLDKAIPMCFDEKGEPTAFVKSASNHHLALYRTPKGKLVESIVTFWDAVDRARYGIPLVITHPREVMEQVLQRGDIPEQVLSLLPPSDWVFVDSLQQDEMVVIGLSDEELQRALEAQNYRKISEHLYRVQKMSSSYYVFRYHLETSVADDKNTSGRIPKFHRVQSLKAYEERNIRKVRVDLLGRISLL

SEQ ID NO: 1135 - protein, 1422 aa, Prevotella denticola
MTQKVLGLDLGTNSIGSSVRNLDLSDDLKGQLEFFSSDIFRSSVNKESNGREYSLAAQRSAHSRSRGLNEARRRKLWATLDLLIKYGFCPMSPESLMRWRTYDKQRGLFREYPIDDKNFNAWILLDFDGDGKPDYSSPYQLRRELVIRQFDFDQPIERYKLGRALYHIAQHRGFKSSKGETLSQQETNSKQSLTDDTADVAGEMKASEEKLSKGLSTYMKENNLLTVGAAFAQLEDEGVRVRNNNDYRAIRSQFQREIETIFKFQQGLSVENELYERLVSEKKNIGTIFYKRPLRSQRGNVGKCTLERTKPRCAIGHPLFEKFRAWTLINNIKVRMSEEEQAEQLPMKLRFELYNDCFLAFVRAEFKFEDIRKYLEKRLGVHFSYNDKTINYKDSTSVAGCPITARFRKLLGEDWESFHVDGQKQRQAHGKNNASFHTVSYSTNDIWHFCYDAEEPEAVLSFAQDNLKWEKKKAEELVRIWSAIPQGYAMLSQKAIRNINKMLILGLKYSDAVLLAKVPEIVEITDGEILSVTEDYHRVEAQVGYEKQINNIVNALIAKYKSASEEYRFADHNYEYQLDKSDEKDIIKQIESNIGTRKWSLLDADEQTDILQKVRDKYQNFFRSHERKFVESPKLGECFEEYLMKKFPMVEGERWKKLYHPSQIAIYRPVPANKDRSALRLGNPDIGAIKNPTVLRVLNTLRKRVNQLLDDGIISPDETRVVVETARELNDANRKWALDTYNRIRHDENEKIKKILAEFYPKRDNISTVDIDKARYVIDQREMDYFTEAKTYHKDIKKYKLWLEQGGQCMYTGRTINLSNLFDPNSFDVEHTIPESISFDSSDMNLTLCDAHYNRFIKKNHIPADLPNYDKSVVIDGKEYSPIKPRLQRWADRVERLNRNVEYWRGQARRAQNKDRKDQCMREMHLWKMELEYWTKKLERFTITEVTDEFKNSQLVDTRVITRHAVLYLKSIFPHVDVQRGDVTAKFRKILGIQSVDEKKDRSLHSHHAIDATTLTIIPGAAKRERMLELFAKIEEVNKMLSFSGNEDRTGLKQELDGLKNQLNKEVKACRIGHNVSEIGTFINDNIIINHHVKNQALTPVRRRLRKRGHIVGGMDNPRWQTGDALRGEIHKASYYGAITQYAKDKEGKVLMKEGRPQINPTIKFVIRRELKYKKSSTDSGFASWDDLGKAIVDKELFALMKGQFPEGTSFKDACEQGIYMIKKGKNGEVDTKLYRIRHIRCKTKQKNALKIKEQAYKSEKEYKRYFYAAVGDLYAMCCYTNGKTREFKIYSLYDISCHRKVGVEDIPEFITDKKGNRLMLDYKLHTGDMILLYKENPEELYDLDNVSLSKLLYKINGFENDGLRIRMVNHLVAKEAMGESVKDYAKLPDIIRCGVKTIKFLVMGENRDFVIKNGKISFNHR

SEQ ID NO: 1136 - protein, 443 aa, Prevotella disiens
MELDYWKGKYNRFTMTEIPEGFSRRQGMGIGLISRYAGLYLKTIFHKKDNPQKSNVYIVKGSITAEFRRIWNIQDDYEKKCRDNHIHHCIDAIVVGCIGKREYDLMAQFYRDEEKYRWEKKKKPFFKKPWETFTQDMLSLKDEVLTVHFNPSNFTKKAHKKVFTPKGIFVAQGDCARVKLHKESYFGAIEQKGEIKYVMRKELSALKIEDIKNIVDAVVKEKVLAVVKKKGFKQAMAEPIYMNEDKRILIKKVRLFVSQTNPLIVKKHRDLSSKEYKQNYYVDNEGNLMIAMYEGVKKNGKIDREITVVNNLEAAKFFRQSQKNNAEKQLISHLSPKNGYPLKTVLTQKQLVLMYEDSPKEIKLRDTKNMVKRLYQVVEIEKDGRVKLKFHQEARSEGLNKNSAAFKIQDTPESLYRHTKSNLKVLVNGVDFKINILGEISLI

SEQ ID NO: 1137 - protein, 1375 aa, Prevotella histicola
MKKILGLDLGTTSIGWALVYESENTDEKSSIVRLGVRVNPLSVDEKGNFEKGKAITTNADRQQTHGARINLQRYKLRRENLKDCLQKQGWIGTEALCEEGKTSTFETYMLRAKAAEEEISLHELCRVLFMMNKKRGYKSNRKANNKEDGKLFDGMTVAKKLYEEHLTPAEYSFQLLSSGKKFKQEYYRSDLKEEFDRIWNEQQKYYPEILTDDFKQQLQGKSKGNTSKIFLGKYGIYSADLKGLDRKLQPLKWRVEALKQQVDKEVLAFVISDLNGQIASTSGLLGAISDRSKELYFNKQTVGQYLWTSLKETPHVSIKNKPFYRQDYLDEFEKIWETQATYHKELTPELKQEIRDIIIFYQRPLKSKKGLISVCELEQRKVKVTIDGKEKEISIGPKVAPKSSPMFQEFRIWQNLNNILLIDKGNNSIHPLYEEEKNLLYEELSVKEKLSKAEALKVLNKNSKQWDLNYKEIEGNRTQAVLYDCYNRIIVMTGHEEYNFKKLKASEIRSYVKTTFTGLGFNTDILEFDSSLTGHELEKQPMYQLWHLLYSYESDNSRTGNDALLRKLETAFGFPKEYAAVLSDVVFEDSYGNLSVKAMRKILPHLQAGLNYSQACEEAGYKHSRRSLTKNELDQKEYKEKLELLPKNSLHNPVVEKILNQMINVINAVIDEYGKPDEIRIELARELKIGAAERENMTRSINQGNAENKRIREILEKEFALSYISRNDIIKYKLYEELKSNGFKTLYSDTYISKDKLFSKDFDIEHIIPKARLFDDSLSNKTIEARDVNIAKSNKTAFDFISEKYDQQGIEAYKKKLDILLQDGSISKAKYNRLLMKEADIPSGFIDRDLRDTQYIAKKAYEILSDLVRNVTPTTGAVTSRLREDWQLVDVMKELNFEKYQKLGLVEVIEDRDGRKIKRIKDWTKRNDHRHHAMDALTIAFTKPSYIQYLNNLNARSDKNSSIYGIENKELHREDNKLRFNAPLPINEFRAEARRHLKSILVSVKAKNKVMTQNVNVIKTKHGVIKKVQLTPRGELHNATFYGTKKRPIIKMVKVGAALDEVTIKKVSSSFIREALLDRLHEYNGDAKKAFTGRNSIDKNPIYIDEEHKKTVPALVKTIEWEMYHPTRKLISPDLKIDKVIDKGIREILKTRLAKFNGDAQKAFSNLDENPIYKDEAKKITLKRVSLEGVSSVIPLHTLKDREGKLVVGKDGKPVLGDYVQTSNNHHIAFYMDENGNLQDNVVSFFEAAERKSQGVPVIDKNYNHDKGWNFLFTMKQNEYFVFPNEVTGFNPSEVDLMDEANYSIISPNLYRVQKMSKASGRDYWFRHHLEAMLNDDPKLRNSMFKRITSLKALEGIVKVRINCIGKIVAVGEYD

SEQ ID NO: 1138 - protein, 1380 aa, Prevotella intermedia
MKRILGLDLGTTSIGWALVNEAENNNEASSIVRLGVRVNPLTVDEKSNFEKGKAITTNADRQLRHGARINLQRYKLRRQNLHDCLQKQGWLGTEAMYEEGKASTFETYKLRAKAAEEEISLHEFARVLFMLNKKRGYKSNRKANNKEDGQLFDGMTIAKKLYEEHLTPAEYSLQLLNKGKKFTQGYYRSDLNAELERIWDEQKKYYPEILTDEFKQQLEGKTKTNTSKIFLAKYGIYSADLKGLDRKFQPLKWRVEALQQQVDKEVLAFVISDLKGQIANTSGLLGAISDRSKELYFNKQTVGQYLWASLEENPHISIKNKPFYRQDYLDEFEKIWETQAAFHKQLTPELKQEIRDIIIFYQRPLKSKKSLISVCELEQRKVKATIDGKEKEITIGPKVAPKSSPVFQEFRIWQNLNNVLLIDNDTNEKRPLDEVERNLLYKELSIKAKLSKTEALKILNKKGKQWDLNYRELEGNRTQAILFDCYNRIITLTGHEECDFKKIKASEIRHYVSTIFKNLGFSTEILDFDPSLKKHELEKQPMYQLWHLLYSYESDNSRTGNESLLRKLETTFGFPEEYATVLCDVVFEEDYGNLSVKAMREILPYLQAGNDYSQACAYAGYNHSRHSLTKEELDQKVYKERLELLPKNSLRNPVVEKILNQMINVINAIIDEYGKPDEIRIEMARELKSSAADRKKTTHAISQGNAENQRIREILEKEFSLSYISRNDIIKYKLYEELEPNYYKTLYSDTYITKDKLFSKDFDIEHIIPKARLFDDSFSNKTLEARNINLEKSNKTAFDFIKEKYGEDGAEAYKKKLDMLLENDAISRPKYNNLLRAEADIPSDFINRDLRNTQYIAKKACEILGELVKTVTPTTGKITNRLREDWQLVDVMKELNFEKYEKLGLTEIVEDRDGRKIKRIKDWTKRNDHRHHAMDALAIAFTKPSFIQYLNNLNARSNKGDSIYAIENKELHYEEGKLRFNAPIPVNEFRAEAKRHLSAILVSIKAKNKVMTQNVNKIKTKHGIIKKIQLTPRGPLHNETIYGTKMRPIIKMVKVGAALDEATINKVSSPAIREALLKRLNEYSGNAKKAFTGKNTLEKNPIYLNAGRTKTVPSLVKTVEWESFHPTRKLIDKDLNVDKVVDKGIREILKARLEEFNGDAKKAFSNLEENPIYLDEAKKIALKRVSIEGVLSAIPLHTLKNQAGKPITGKDGKPVLGNYVQTSNNHHIAFYYDEDGNLQDNAVSFFEAAERKSQGIPVIDKDYNRDKGWRFLFTMKQNEYFVFPNEATGFIPSEVDLTDEANYGIISPNLYRVQKVSRIDKGTSASRDYWFRHHLETILNDDAKLKNLAFKRIRGLLELKDIIKVRINSTGKIVAVGEYD

SEQ ID NO: 1139 - protein, 129 aa, Prevotella multiformis
MQKGGTGCKINRQTVGNVEVNVLNLRLYDRTDDREVTAGYLPTKEDYVRLFVYLNDRKEINQDTLLKDYFRLKKVKCGNEKEFAIRWNYIEDKEKKYPCNETRHELLAALDRAGMEHGWLDDSGTSARW

SEQ ID NO: 1140 - protein, 535 aa, Prevotella multiformis
MVKGLLSNIVRTAEEREETSKFVISCTGRITDRLKQDWGLNDVWNSLVYTRFKRLNELTETEAFGHWQDKDRRVFQTSVPLELQRGFSKKRIDHRHHAMDALVIACASRNIIGYLNNESAESPEKREDLRRKLCDKNHIIRKPWESFTQDARAALEDIVVSFKNYVRIINKATNYYERYDADGRKTKAEQKGGEMWAVRKPMHEATYYGKVNLRRKERVSLKAALEDIPSICNRDLRDYINGLVEKHFNKEQVLAQFRSVGNRWNKQHIDKVDVWRFSDGKEEMVATRKPLDTSFDAKRIEAVTDTGIQRILSNYLEAKGGDPKIAFTPEGIADMNQHITAYNNGKQHKPILKVRVSTKLGKKYPVGQTGCKAGQFVVAEAGTNLYFAVYEDGEGNRSYDTIPLNEAVECLKQGLPPVPETREKGDRLKFYLSPNDLVYVPAGDEENEIDRERIYKFVDSSGTTANFIPHRTAGLIYNVDKKLAEALCNGSIIQNEYGVGSQQSKNQKALTGEMVKAVCWKLEVDRLGNILRIIK

SEQ ID NO: 1141 - protein, 1380 aa, Prevotella nigrescens
MKRILGLDLGTTSIGWALVNEAESNNEASSIVRLGVRVNPLTVDEKSNFEKGKAITTNADRQLRHGARINLQRYKLRRQNLHDCLQKQGWLGTEAMYEEGKASTFETYKLRAKAAEEEISLHEFARVLFMLNKKRGYKSNRKANNKEDGQLFDGMTIAKKLYEEHLTPAEYSLQLLNKGKKFTQGYYRSDLNAELERIWDEQKKYYPEILTDEFKQQLEGKTKTNTSKIFLAKYGIYSADLKGLDRKLQPLKWRVEALKQQVDKEVLAFVISDLKGQIANTSGLLGAISDRSKELYFNKQTVGQYLWASLEENPHISIKNKPFYRQDYLDEFEKIWETQATFHKQLTPELKQEIRDIIIFYQRPLKSKKSLISVCELEQRKVKATIDGKEKEITIGPKVAPKSSPVFQEFRIWQNLNNVLLIDNDTNEKRPLDEDERYLLYKELSIKAKLSKTEALKILNKKGKQWDLNYKELEGNRTQAILFDCYNRIITLTGHEECDFKKIKASEIRHYVSTIFKNLGFSTEILDFDPSLEKHELEKQPMYQLWHLLYSYESDNSRTGNESLLRKLETTFGFPEEYATVLCDVVFEEDYGNLSVKAMRKILPYLQAGNDYSQACAYAGYNHSRHSLTKEELDQKVYKERLELLPKNSLRNPVVEKILNQMINVINAIIDEYGKPDEIRIEMARELKSSAADRKKTTHAINQGNDENQCIREILEKEFALSYISRNDIIKYKLYEELKPNGFKTLYSDTYIPKDKLFSKDFDIEHIIPKARLFDDSYSNKTLEARDINLAKSNKTAFDFVKEKYGEQGAEAYKKKLDMLLGNNVISKPKYNKLLMTEADIPSDFINRDLRNTQYIARKACEILGELVRTVTPTTGKITNRLREDWQLVDVMKELNFEKYEKLGLTEIVEDRDGRKIKRIKDWTKRNDHRHHAMDALAIAFTKPSYIQYLNNLNARSNKGDSIYAIENKELHYEEGKLRFNAPIPVNVFRAEAKRHLSAILVSIKAKNKVMTQNVNKIKTKHGIIKKIQLTPRGPLHNETIYGTKMRPIIKKVKVGAALDEATINKVSSPAIREVLLKRLNEYSGNAKKAFTGKNTLDKNPIYLNAERTKTVPASVKTVEWENYHPIRKPITPDLKVDKVIDKGIGEILKARLEEFNGDAKKAFSNLEENPIYLDQTKKIALKRVSIEGVLSTIPLHTLKNQAGKPIMGKDGKPVLGNYVQTSNNHHIAFYYDEDGNLQDNAVSFFEAAERKSQGISVIDKDYNRDKGWRFLFTMKQNEYFVFPNEATGFIPSEVDLTDEANYGIISPNLYRVQKMSRIEKGTSVSRDYWFRHHLETILNDDSRLKNSAFKRINSLKPLEGIIKVRINSIGKIVAVGEYD

SEQ ID NO: 1142 - protein, 1506 aa, Prevotella nigrescens
MKTILGLDLGPNSIGWAKVEVDDEGNYLRNIKLGSRIIPMTQDMLGDFDKGVKVSQTAIRTDFRGNRRLIERHLLRRERLHRVLHALKFLPKHYEDAIGWDRNEPATYGKFVNNSEPKLAWERQEDGSMRFLFMESFNEMVADFAQNQPSLVSDGKKIPLDWTIYYLRKKALTRPIKKEELAWILLNFNQKRGYYQLRGEEEEDNLTKRKEYYKLKVVGVEADGAPKGGKTWYNIHLENGWTARCQSKIPLDDWVGKVKEYIVTTEYEDDGKTPKCDKEGKVKRSFKSPEKDDWQLIKTRTEKFIDDSNKTVGAFIYDYLLEKPFDKIRGKYIRTIERKYYKNELREILREQTKYHEGLHSLEALKICAEELYKNNQQHQEYLLKKDMTFLLLNDLIFYQRPLKSKKSLIADCPYEVYKYDDKLTGKKGQKKIKCIAKSNPYYQEFRLWQFIANLRLFSVTDGKEVTAEYLKTEEDYVRLFSFLNDRKDIKQETFLRSFLKLKKESIGSEKIYPIRWNYIEDANKSYPCNATRHELLLAFDRADIPRELLDVEEREYRLWHLLYSIEAKEETESALRKLKANKAFGDLNIDDAFVNSFLKIKPFEKEYGAYSEKAIKKLLAVMRRGSLWKEADICEATKQNIAKILQNDIDEKLKKKIEAAVSSFNKLSDFQGLPTWLACYVVYGRHSEAAQIQCWQSPEDLKTYINKFKQHSLRNPIVEQCLLETLRTVYDIWKDAGQIDEIHIELGRNMKSTAEQRARKTKDILRNENTNLRIKNLLVELKNDDKIENVRPYSPSQQEILRIYEEGALQELSKEDEMFEDISKISKMAQPSPTELSRYKLWLEQKYRSPYTGRVIPLSKLFTTAYQIEHIIPQSRYFDDSFNNKVICESEVNSLKDNMLGYEFIKECGGRIVHCTLLGDVKIFTKEEYKDFVTKHYIDNTYKRDKLLLEDIPQEFSARQLNDSRYISKMVQTVLSNIVRAENEQEATSKFVVSCNGAITNRLKKDWGLNDVWSSIVCPRFKRLNEITKTNAFGHWEDKAGKHVFQTTVPLELQRGFSKKRIDHRHHAMDALVIACASRNIVNYLNNESANSPEKREDLRKKLCDEKRKIRKPWKTFTQDAREALSDVVVSFKNYVRVINKATNYYEHYSSSGNKVMISQKGNDMWAIRKPLHKESVFGRVNLCRKVIVSLKKALENIPAICDKTLRDYINALVEKHFNTRQLLAHFKSINYRLNRQCVEKVEVWQFSDEKIEMVARRKSLDTSFDDKQISSITDTGIQKILLNYLQTKDGNAEIAFTPEGIEEMNKNISLYNDGKAHQPILKVRVATPKGMKYPVGQTGNKATKFVVAEKGTNLYFAIYENELGVRSYDTIPLNIVVERLKEGLSPVPQANEADIPLKFYLSPNDLVYVPTKENEDELCRDRIYKFVDSSGTTANFVPHTSANTIYNVDKEYAEKCCNGAVFLNEYGLGSPQSKNQRALTGEMIKEICWKLKVDRLGNIIKVIK

SEQ ID NO: 1143 - protein, 774 aa, Prevotella oulorum
MEQCILETLRTVYDIWKEAGQIDEIHVELGREMKQTAEQRAHLTEKVLRNENTNLRIKSLLMELKNDADMKDVRPYSPMQQEILRIYEEGALQTLSKDDAAFTEIMKISKMAQPSASELQRYRLWLEQKYRSPYTGKPISLSKLFTSAYQIEHIIPKKRYFDDSFSNKVICEAEVNGKKDSMLAYEFIKDCGGDVIHCTTLGDVTILSEAEYKALVTELYANNKSKKDKLLMEDIPQDFINRQLNDSRYISRVVMTLLSNIVRIEGEEEATSKFVIPCSGGITDKLKKDWGLNDVWNNIVYPRFERLNALTNTSDFGQWENKEGKRVFQTSVPLELQRGYQKKRIDHRHHAMDALVIACASRKIINYLNNQEANDPTKQENARKQLCIKSRIIRKPWETFTQDAYKALDNIVVSFKNYVRVINKATNYYERYNADGKKAVDEQKGEAMWAIRKPMHKDTVFGHVNLRRKAVVKLKDALENIPAICDKTLRHYIQDLQKKHFNTKQLLAHFKSINYRLNKQAVDKVEVWQYSDDKEQLAATRKPLGPSFDAKCIAAITDTGIQKILLNYLQAKGGDPAIAFTPEGIAEMNQNIAVYNGGKQHQPILKVRIAKPMGKKFPIGQTGNKAFQYVIAEEGTNLYFAIYEDEEGNRTYDTIALREVVERLKQGLTPVPEKNEKGVALKFHLSPNDLVYVPTADELLSKVCSLDKNRIYKMVSATKSECLFIPHSVAKTIYDKVEFEALNKMGRALTGEMIKSVCWKIEVDRLGHIVNIIK

SEQ ID NO: 1144 - protein, 691 aa, Prevotella oulorum
MKTILGLDLGTNSIGWAKVIVDDNENYLRDIQLGSRIIPMSQDVLGKFDKGVTESQTAIRTSFRGVRRLRERTLQRRERLHRVLHTLHYLPPHYDSAIGWDRKTPTTYGKFLNHGEPKLAWERREDGTMQFLFMDAFHEMIADFAKYQPALVADGKKVPLDWTIYYLRKKALTQPIKKEELAWILLNFNQKRGYYQLRGEEDEENAAKHEEYHELKVVGVEVDEAGKGDNTWYNVKLENGWTYHRQSKIPLDDWVGKVRAFIVTTEYEKDGTTPKKDKEGNVKRSFRSPDEKDWGLRKKQTEHSLEASGTPVGAFIYDHLLKEPSDKIRGKFIHTIERKYYKQELAAILREQSKHHEKLCSKDMLKACIEELYPNNPLHRESLLKKDMPYLLIEDLIFYQRPLKSKKSLIAECPYEAYSYVDKETGEMKRQGIKCIAKSNPYYQEFRLWQLIANLRLRNRSDERDVTAEYLPHQEDYVRLFTYLNDRKEINQETLLKDFFKLKKVTIGGEKVFPIRWDYIEDKEKKYPCNATRHELLLALDRAGIEHDWLNDRDLAYRLWHLLYSVDSKDETERALRKLKDDDAFVESFLKIKPFEKEYGAYSEKAIKKLLPVMRRGSLWNEADLCPSTKERIANILQGTIDEKLKKKIGAFISSCQQVSDFQGLPEWLACYVVYGRHSEATDIQRWETPE

SEQ ID NO: 1145 - protein, 242 aa, Prevotella saccharolytica
MKLVLGLDLGVGSVGWALIFITDSGEPIKILALGERIVSMDSNNSNEFSAGATCTLNQKKTKAKSVRKGYSRYVQRRDALTAELRHIGMMPDETLIKLPVLDLWQLRANAATEGKKLSLAEIGRVLYHINQRRGYKHGKSDVSSDNKQKGYVKAVNERYCMIQERQQTIGQYFALKLKETAVTTEKGTFYTFRIKDQVFPREAYEEEFVVAYSTKVLKFKQITTLLNVVICLMMLLLIVQRY

SEQ ID NO: 1146 - protein, 1174 aa, Prevotella sp.
MEFHPELCDAELLKACAEELYRNNEAHRAQLLAKDFKHLLVEDVLFYQRPLKSKKSLIANCPYETRQYINKETGEIKDVNVKCIAKSNPYFQEFRLWQWISNLRLLRQADGQDVTAAYIKGNEDKERLFDLLNNQGEIKQEHILRDFLKLKKPKGGEFPLRWNYVDDKIYPANETRHAINKAIKGMAVDKEEKETLGQLLDQPAVAYMLWNLLYSITDRNELARALRRFALTHGVSSVDAFVESFLKVKPFKKEYGAYSEKATKKLLQVMRLGKYWCGDELPEPAKRTKGNKQAVYDEMAHRGICKQTLQNISNIIEENIDERLMGALLNPERPLTELSHFQGLSVSDACYVVYGRHSEVAEIVKWKDADELNTFINNFKQHSMRNPIVEQCVLETLRTVRDVWEQEGQIDEIHVELGRNMKRTAEQRARDTQAIQRNENTNMRISLLLTELKNDPSISDVRPYSPSQRELLKIYEEGALENLTNQDEDIAKISRLAQPSASELRRYKLWLDQKYVSPYTGRPIPLAKLFTPAYEIEHIIPQSRYFDNSFSNKVICEAEVNKLKDNLLGMEFIKKFGGKTKGILDEEAYKLHVTTNYAHNPAKRSKLLMEDLPTDFNSRQLNDTRYISKTVMALLSNVVREEGERETRSKHVVVCTGGVTDTLKKDWGLHDVWHNLVYPRFIRLNNLTGSQNFGYWRYLNEENSKKGEDSKKVFQITLPPECQRGFVKKRIDHRHHAMDALVIACASANIVNYLNNQSAANPHIHENLQRLLCDRKREIRKPWPTFTQDAQAALKDLVVSFKNTVRVVNKASNTYLRYDKDGKKKRFKQEGEGLKAIRKPMHKETYYGEVNLIRKEMVPLKRALDDVNAIVDKELRASIKGLLRDGFNPQQVLANFKAKDFKFDKRDIKKVEVYVSSEKSTPMVATRKSLDTSFNAKRIADITDTGIQKILLNYLKANDNSPEQAFTPEGIAYLNEHIAEYNDGKPHQPILKVRVSEVKGAKFAVGQTGSKKDKFVEAQSGTNLYFAIYEDKEGKRHFETIALKVAAERLKDKQMPVPEINDAGLPLKFYLSPNDLVYVPTDEDRATAHPSIDKMRIYKMVSATDRQCFFLPFTVASVISNKVEFEALNKMERVLDASEYSSAYDSSHVNKVMVKNVCWKLEVDRLGNITKIVR

SEQ ID NO: 1147 - protein, 992 aa, Prevotella sp.
MITRILGLDTGTNSLAWAVVDRDANGNYTLVKRGDVIFTEGVKIEKGIESSKAAERTAHKALRVHYSRRRLHKIDTLKVLVELNLCPCLSDEQLSQWKAKKTYPLTDDFMLWQRSGSAEENNPYYCRHRCLTQKLDLTDQSQRFLLGRAFYHLAQRRGFLSNRLDTSADSDESGKVKSGIAQLSVEMEKAGCEFLGEYFYQLYKQHGNTIKLRSRYTDREEHYKKEFLAICEKQELDPKWVEALQRAIYFQRPLKSQRKGVGKCTFEPKKPRCAESHPDYEAFRMLCFLNNVKIQTPNDTSLRPLNEDEREKIWPIFFRKSKPNFDFEDIAKALAGKNNYAWYKDAGEKPFKFNYRMQQGVSGCPVTAQLIDIFGSDWQTAIAETYTAVEKKNGTKTIDEMADDVWNVLYSFSSKDKLKAFATEKLQLDEASATKFANAKLPHGFASLSLKAIRNILPFLRQGFIYAHAVHLAKIPDIVTKAVWNDADKREMILSGLMEIIENYNPKDRGVEGTIDFCIKSHLQDVIDLRPGAADALYHPSMIETYPDAKLNKMGVFQLGSPRTNAIRNPMAMRSLHILRSVVNQLLRDGIIDRDTEVHVEYARELNDANKRKAIADYQREQEKKRKQYRDDIIALYKSECHKEIEPTDTDILKFQLWEEQNHLCLYTGTQIGICDFLGDNPKFDIEHTVPRSVGGDSTQMNLTLCDATFNRQVKGAQLPSQLSNHADILVRIDHWKSKCEDLRKQLDKIRTYGGMEKNMKDRLIQKRHRLKMDLDYWQGKYSRFTMTEVPEGFSRRQGAGIGLVSKYAGLFLKSLFHNEQNPNKSNVYVVKGVTTAEFRRMWGLQGEYEKKSRLNHCHHCIDAITIACIGKAEYDKMAQYYHDEELFQWRGTTTKPHFNKPWPTFTEDVLAIEQSLLVKHLTKDNMPKQAKKRVRTATGKYLAQGDTARGSLHKDTYYGAIEQNGEIRYVLRKPLNKFENEAELEKIVDQA

SEQ ID NO: 1148 - protein, 1375 aa, Prevotella sp.
MKKILGLDLGTTSIGWALVNESENKDEQSSIVRLGVRVIPLTVDEKGNFEKGKAITTNADRQQVHAARINLQRYKLRRENLRDCLQKQGWIGSEPMCEDGKSSTFETYKLRAKAAVEEVSLHEFARVLFMLNKKRGYKSNRKANDKEEGKLFDGMTIAKKLYEEHLTPAEYSLQLLNTGRKFTPEYYRSDLIEEFEKIWNEQQKYYPEILTDEFKQQLEGKAKSNTSKLFLGKYGIYSADTKGLDRRLQPLKWRVEAMKQQVDKDVLAFVISDLKGQIANTSGLLGAISDRSKELYFSKQTIGQYLWASLQENPHISIKNQPFYRQDYLDEFEKIWETQATYHKELTSELKQEIRDIIIFYQRPLKSKKNLIAVCELEQRKVKVTVDGKEKEITIGPKIAPKSSPMFQEFRIWQNLNNILLLDHETNSKRPLYEEERNLLYEELSVKEKLSKTEALKVLGKKSKQWDLNYKELEGNRTQAVLYDCYNRIIVMSGHEECNFKKLKASDIRHYVKMIFKNLAFNTDILCFDSSLKGHELERQPMCQLWHLLYSYEGDNSRTGNDALLRKLETSFGFPKEYAAVLADVIFEDSYGNLSVKAMRNILPHLQAGKDYSQACEEAGYKHSRRSLTKEELNQKVYKEKLELLPKNSLHNPVVEKILNQMVNVINAVIEEYGKPDEIRIELARDLKIGAAERENMTRSINQGNAENKRIREILEKEFALSYLSRNDIIKYKLYEELKSNGFKTLYSDTYISKDKLFSKDFDIEHIIPKARLFDDSLSNKTIEARDVNIAKSNKTAFDFILERYGEQGVKTYKTKLLRLLEDGAISNKKYNNLLKTEADIPSGFIDRDLRNTQYIAKKAYEILSELVKIVTPTTGSVTNRLREDWQLVDVMKELNFEKYQKLGLADVIEDRDGRKVKRIKDWTKRNDHRHHAMDALTIAFTKPSYIQYLNNLNARSDKSSSIYGIEVKELHREEGKFRFNAPLPINEFRAEAKRHLKSVLVSIKAKKKVMTQNVNKIKTKHGIIKKVQLTPRGELHNATYYGTKKRPLVRMVKVGAALDEATIKRVCSPAIRAALLKRLNAYNGDAKEAFTGRNSIDKNPIYLDIEQTKLVPVLVKTIEWGMYHPIRKRITPDLKIDKVIDKGIREKLKARLAEFNGDAQKAFSNLDENPIYMDEAKRITLKRVSIEGVLSAIPLHTLKDKAGKPVIGSDGKPVFGDYVQTSNNHHIAFYIDDKGNLQDNPVSFFEAAERKSQGVPVIDRRYNCDKGWHFVFTMKQNEYFVFPNEATGFIPSEVDLLDEANYCIISPNLYRVQKLSKASGRDYWFRHHLETMLNDDLRLKNSTFKRIQSLKGLEDIVKVRINSIGKIVAVGKYD

SEQ ID NO: 1149 - protein, 1483 aa, Prevotella sp.
MKTILGLDLGTNSIGWAKVSVDDYGNYLHDIKLGSRIIPMSQDVLGNFDSGVTVSQTAQRTEFRSKRRLVQRNLQRRERLHRVLHVLDFLPAHYDAAIGWDRTEAVTYGKFLNHAEPKLAWEELGNGKRRFLFMDSFHEMVADFARCQPALVADGKKIPLDWTIYYLRKKALTQAITKEELAWILLNFNQKRGYYQLRGEEEEENPTKQEEYYELKVVSVEATDSRKGNDTWYNVHLENGWIYRRSSKISLDDWVGKVKQFIVTTEYEKDGTTLKTDKEGNVKRSFRAPNENDWGLRKKRTETLLEMSGKTVGAFIYDHLLQEPADKIRGNFIRTIERHYYKAELEAILAEQCKYHIELRDKEMLEACARELYLNNLPHQRSLMKKDMTYLLLYDLIFYQRPLKSKKALIANCPYEYYEYVDKETGEIKRQNIKCIAKSNPYFQEFRLWQFVLNLRLFDRVEDKEVTANYLPTADDHARLFTYLNDRKEINQETLLKDYFKLKKVKIGNEKEYPIRWNYIEDKEKKYPCNETRYELLMALDRAGIEHKWLDDNNLEYRLWHLLYSVEVKSESETALRKLKNDDAFVNSFLKVKPFKKEYGAYSEKAIKRLLAVMRKGFLWNEQDICDETRKRIEIIIKGDVDEKVKERMGHAAYSFDRVSDFQGLPEWLACYVVYGRHSEAMDIQRWDSPERLMAYINNFKQYSLRNPIVEQCILETLRTVHDIWKETGQIDEIHVELGREMKSTSEERARRTQNVLRNENTNLRIKSLLIELKNDTDICNVHPYSPMQQEILRIYEEGALQELNREDEDFEEISKISQMSQPSGKELNRYKLWLEQKYRSPYTGKAISLAKLFTPAYQIEHVIPQSRYFDDSFTNKVICEAEVNTLKSNLLGYEFIKKHGGEIIHCTTLGDVRIFSESEYKAFVMDHYANNKSKKDKLLMEDIPQEFLSRQMNDSRYISKVVKTLLSNIVRMADESEATSKSVIVCTGGVTDRLKKDWGLNDVWNSIVYSRFERLNRLTGTEAFGHWENKDGKRVFQTSMPLELQRGFRKKRIDHRHHAMDALVIACASRNIVNYLNNESANNPKKREDLRRQLCDKNRVIRKPWETFTQDAYNALENVVVSFKNYVRVINKATNRYEHYDENGKKRFVQQKGSELWAIRKPMHKETYYGHVNLRRKELVTLQKALDDIPSICDKKLRDYISALVEKHFNKRQLLAHFKSTDYYWQKQYVNKVYVWTFSDDIKPLVATRKLLDTSFDAKRIGTITDTGIQKILRNYLEAKGGNATLAFTPEGIVEMNQNISKYNDGKPHQPILKVRITEPMGAKYRVGQTENKMAKYVEAQSGTNLYFAIYEDSEGKRSYTTVPLDEVAERLKQRLSPVPEKDENDVPLKFYLSPNDLVYVPTEEELQLRECKLNKDRIYKMVSSTGSECHFIPYYVANVIYNKVEFEAKNKIGRALTGEMIKAVCWKLEIDRLGNILKVIK

SEQ ID NO: 1150 - protein, 593 aa, Prevotella sp.
MNTRILGLDTGTNSLAWAVVDRDAKGNYTLVRRGDVIFTEGVNVDGQPVPSKAAVKSKYKSLRVQYARRRLRKIDTLKVLVSLDLCPYLSDQQLSQWKAKKTYPLTDDFMLWQRSGSAEENNPYYCRYRCLTQKLDLTDQSQRFLLGRAFYHLAQRRGFLSNRLDTTSDSAESGKVKSGIAQLSVEMEKAGCTFLGEYFYQLYKQHGNTVRLRSRYTDREEHYIKEFLAICEKQELDAQWVEKLQRALYFQRPLKSQRKGVGKCTFEPKKPRCAESHPDYEAFRMLCILNNIKIKTPKDVSLRPLNAEEREKVWPLFFRKSKPNFDFEDIAKALAGKNNYAWYKDAGEKPFRFNYRMHQGVSGCPVTAQLIDIFGSDWKAGIAETYTAVGKKNGTKTIDEMADDVWNVLYSFSSKDKLKAFATDKLQLDEARATKFANAKLPHGFAALSLKAIRNILPFLRQGFIYAHAVLLAKIPDIVTAAVWDDADKREQILSGLLEVIENYNPDDRGIEGTIDFCIKSHLQDVVDLRPGAADALYHPSMIEAYPDAKLNKMGVFQLGSPRTNAIRNPMAMRSLHILRSVVNLLLRDGMLS

SEQ ID NO: 1151 - protein, 1424 aa, Prevotella sp.
MTQKVLGLDLGTNSIGSAVRNLDLSDDLQWQLEFFSSDIFRSSVNKESNGREYSLAAQRSAHRRSRGLNEVRRRRLWATLNLLIKHGFCPMSSESLMRWCTYDKRKGLFREYPIDDKDFNAWILLDFNGDGRPDYSSPYQLRRELVTRQFDFEQPIERYKLGRALYHIAQHRGFKSSKGETLSQQETNSKPSSTDEIPDVAGAMKASEEKLSKGLSTYMKEHNLLTVGAAFAQLEDEGVRVRNNNDYRAIRSQFQHEIETIFKFQQGLSVESELYERLISEKKNVGTIFYKRPLRSQRGNVGKCTLERSKPRCAIGHPLFEKFRAWTLINNIKVRMSVDTLDEQLPMKLRLDLYNECFLAFVRTEFKFEDIRKYLEKRLGIHFSYNDKTINYKDSTSVAGCPITARFRKMLGEEWESFRVEGQKERQAHSKNNISFHRVSYSIEDIWHFCYDAEEPEAVLAFAQETLRLERKKAEELVRIWSAMPQGYAMLSQKAIRNINKILMLGLKYSDAVILAKVPELVDVSDEELLSIAKDYYLVEAQVNYDKRINSIVNGLIAKYKSVSEEYRFADHNYEYLLDESDEKDIIRQIENSLGARRWSLMDANEQTDILQKVRDRYQDFFRSHERKFVESPKLGESFENYLTKKFPMVEREQWKKLYHPSQITIYRPVSVGKDRSVLRLGNPDIGAIKNPTVLRVLNTLRRRVNQLLDDGVISPDETRVVVETARELNDANRKWALDTYNRIRHDENEKIKKILEEFYPKRDGISTDDIDKARYVIDQREVDYFTGSKTYNKDIKKYKFWLEQGGQCMYTGRTINLSNLFDPNAFDIEHTIPESLSFDSSDMNLTLCDAHYNRFIKKNHIPTDMPNYDKAITIDGKEYPAITSQLQRWVERVERLNRNVEYWKGQARRAQNKDRKDQCMREMHLWKMELEYWKKKLERFTVTEVTDGFKNSQLVDTRVITRHAVLYLKSIFPHVDVQRGDVTAKFRKILGIQSVDEKKDRSLHSHHAIDATTLTIIPVSAKRDRMLELFAKIEEINKMLSFSGSEDRTGLIQELEGLKNKLQMEVKVCRIGHNVSEIGTFINDNIIVNHHIKNQALTPVRRRLRKKGYIVGGVDNPRWQTGDALRGEIHKASYYGAITQFAKDDEGKVLMKEGRPQVNPTIKFVIRRELKYKKSAADSGFASWDDLGKAIVDKELFALMKGQFPAETSFKDACEQGIYMIKKGKNGMPDIKLHHIRHVRCEAPQSGLKIKEQTYKSEKEYKRYFYAAVGDLYAMCCYTNGKIREFRIYSLYDVSCHRKSDIEDIPEFITDKKGNRLMLDYKLRTGDMILLYKDNPAELYDLDNVNLSRRLYKINRFESQSNLVLMTHHLSTSKERGRSLGKTVDYQNLPESIRSSVKSLNFLIMGENRDFVIKNGKIIFNHR

SEQ ID NO: 1152 - protein, 241 aa, Prevotella sp.
QAVKEKIKEAIAGKNFKTAIAEPIFMNKEKGIRINKVRYYVKAQERLKIRQQRDLSSKEYKQFFCVENESNYLLAIYEGELKGKKERDFCVVNNLDSAACLKRSNKGKAAPLVPERSEERNLPLLAVLKRGTQVLFYENSPEEILFDNPQDLVRRLYKVTGINTKKDVKNGKTYLYGNIELRFHQNAQKKDDVKMQSGVYKNNEVLRQGIVLSHKQFKALVEGVDFEFNVLGEIKKKERHA

SEQ ID NO: 1153 - protein, 1216 aa, Prevotella stercorea
MTKILGIDTGTNSLGWAIVDKTADNYNLLDKGVNIFQEGVKIEKGIESSKAAERTEHRATRVRYYRIKLRKIRLLRILSDNHLCPPLSQEELSTWRLKKVYPKNELFMQWQRTDDDTEKTPYAYRHKCIHEKLDLSDVTDRYILGRAFYHIIQRRGFLSNRKEQGGEDSGKVKEGISTLTHEMNEAGYEYLGDYFYALYNKGEKIRKHYTARNEHFLSEFKAICEKQDLEKELGSEVVRNIEKAIFDQRPLKSQKGQVGKCVFEKNKTKCPSSHPMYEEFRMLTFINNIKIKTPNDDVLRPLNTGEREKIMPLFFRKSKKQFDFEDITKKLAPKKMYGFYKKEEDAEMPFLFNYPMDTSVSGCPVTAALKDVFGDDWITAICETYTLGEGKSRFDIVNDIWHALYFYSDKDKLAEFAINRLQLSEDEAKIFSEISLPADYASLSLKAICKILPYLRRGLIYSHAVFLGNLCEVMPKYEWSIKEMRETIIDNIIMEMDKCDTKDKRTFEVCIKDYLKGQYNVSDNSLKKLYHPSMIETYPRVQYTNEHGVYQLGSPRIDSVRNPMAMRSMFRLRKLVNRLLVEGKIDQNTEVHIEFARELNDANKRNAIALFVKENQSANDEARKQIITLFKKETGTDIEPTDKDILKYVLWEEQNHICLYTGKQIRISDFIGANPKFDIEHTIPRSVGGDSTKMNLTLCDSRFNREVKKTKLPVELPNHDEIMERIKEWKKNYELLDIQIRKNKKLSKGATTKEQKDTIIRKRHLLELRRDYWRGKYERFTMESVPEGFSRRQGTDISVISKYARLYLKSLFNRVYTVKGIATSDFRKIWGIQDIYSKKERINHVHHCIDAIVIACIGLDEYNKLGAYYHDEENNKWYGMSKASFKKPWATFVEDIKKIQDEILVYHYTPDNMPKQGRRRIKIDGKKILCKGDAARGSLHNDTYYGAIENDGAVKYVKRIDLASLEEKDVKNIVDDTVRSIIEAAIKEKGFKDAMASTIWMNEEKRVPIKKVRCFTPSITKPLNIRKQRDVSIKEYKQQYHVANDSNYLLALYIGTDNKGKEKREFEIVNILQAAQYYRTSNDKEVVDRHIVPIKSEHDYPFAYTLKIGTMVLLYEKSPNEVWDATIKERNRRLYKVTGLSTMRMKGRNGEYAYATVKLIHNEEARPSKDIKAKNGEYEQGEEFRPAIIMLHTQLNALVQGYDFEINELGEIRRLR

SEQ ID NO: 1154 - protein, 1487 aa, Prevotella timonensis; identical to SEQ ID NO: 130

SEQ ID NO: 1155 - protein, 770 aa, Pseudoramibacter alactolyticus
MAKGYFASDEEIDFSGVDDGFKNTLSSHQKFKEIFDVEVLNDWQKSMSEKIIFWATVYGDSKKFLKERLEDAYGNELDQKQIKRILGLRFKDWGRLSEAFLNLEGKNSKTNQSQTIIEALWNGDGTNNFNLMELLSSQFTYRDTLKKRALKGEKTLTNITYEDLSDLYLSPSVRRMVWQTILIVKELRQVLGAGPAKIFIEMARDVTLKAGTRTTSRRQQLLDLYKNVQTESRNWVEEIETQEESRFRSKKIFLYYTQMGQCMYTGEPIVFKDLFNRNLYDIDHIYPRHFVKDDSLINNLVLVKKQANSHKSDTFPIENSIQQARRDFWKWLSEKGLISREKFNRLTRRTSFSDEELAGFISRQIVETRQGTKAVAQIFENALPDSEVVYVKAGNVSDFRHHFNLLKCREINDLHHAQDAYLNVVVGNVYHTKFTKNPINFIKGYRKDRKAYAYHMDQIFDHPVKRNDIIAWQTDKNQSIATVKKVMAKGTPLVTRMSYEEHGELSNQNICSAKAAQKAEGKGYLPIKNSERLSNTQRYGGYNKYAGSYFFLVEHTLKKNRVRTIETMPLFLRDTIKTSKDLLKYCCESLKLEAPSIRVMKIKMGSLLSVNGAFVYLTGRSGKKLITPNGFQLILPQKWQDYIRLLIKTKDSPDDVEGISGGKNIEFYDILVEKHTKTCLKNRPNPIGEKLREWRNDFIALDNQKQSDILLEILKLTTFDNSGADLRAIGGKNQSGVSTIGKKISSQKSVVLVHRSVTGIFEKQVDLLSI

SEQ ID NO: 1156 - protein, 103 aa, Rhizobium etli
MSGEQLTREIGRSGVKASAVGLGTWAIGGWMWGGTDEAQSIAAIQASLDAGVTLIDTAPAYGLGRSEEIVGKALAGRRDKAVIATKCGLVWHTQKGNHFFDQD

SEQ ID NO: 1157 - protein, 1059 aa, Rhodovulum sp.
MGIRFAFDLGTNSIGWAVWRTGPGVFGEDTAASLDGSGVLIFKDGRNPKDGQSLATMRRVPRQSRKRRDRFVLRRRDLLAALRKAGLFPVDVEEGRRLAATDPYHLRAKALDESLTPHEMGRVIFHLNQRRGFRSNRKADRQDREKGKIAEGSKRLAETLAATNCRTLGEFLWSRHRGTPRTRSPTRIRMEGEGAKALYAFYPTREMVRAEFERLWTAQSRFAPDLLTPERHEEIAGILFRQRDLAPPKIGCCTFEPSERRLPRALPSVEARGIYERLAHLRITTGPVSDRGLTRPERDVLASALLAGKSLTFKAVRKTLKILPHALVNFEEAGEKGLDGALTAKLLSKPDHYGAAWHGLSFAEKDTFVGKLLDEADEERLIRRLVTENRLSEDAARRCASIPLADGYGRLGRTANTEILAALVEETDETGTVVTYAEAVRRAGERTGRNWHHSDERDGVILDRLPYYGEILQRHVVPGSGEPEEKNEAARWGRLANPTVHIGLNQLRKVVNRLIAAHGRPDQIVVELARELKLNREQKERLDRENRKNREENERRTAILAEHGQRDTAENKIRLRLFEEQARANAGIALCPYTGRAIGIAELFTSEVEIDHILPVSLTLDDSLANRVLCRREANREKRRQTPFQAFGATPAWNDIVARAAKLPPNKRWRFDPAALERFEREGGFLGRQLNETKYLSRLAKIYLGKICDPDRVYVTPGTLTGLLRARWGLNSILSDSNFKNRSDHRHHAVDAVVIGVLTRGMIQRIAHDAARAEDQDLDRVFRDVPVPFEDFRDHVRERVSTITVAVKPEHGKGGALHEDTSYGLVPDTDPNAALGNLVVRKPIRSLTAGEVDRVRDRALRARLGALAAPFRDESGRVRDAKGLAQALEAFGAENGIRRVRILKPDASVVTIADRRTGVPYRAVAPGENHHVDIVQMRDGSWRGFAASVFEVNRPGWRPEWEVKKLGGKLVMRLHKGDMVELSDKDGQRRVKVVQQIEISANRVRLSPHNDGGKLQDRHADADDPFRWDLATIPLLKDRGCVAVRVDPIGVVTLRRSNV

SEQ ID NO: 1158 - protein, 1405 aa, Riemerella anatipestifer
MKTILGLDLGTNSIGWALVKEAENSNEKSEIIKLGVRVNPLTVDEKTNFEAGRPLSTNADRTAKRSARRNLQRYKLRRKNLIDLLIKNQLIDKDTPLTEIGKNTTHQTLELRAKAARERIELEDLARVFLAINKKRGYRSSRKVNNEEEGQAVDGMAVAKKLYDENLTPGQYAYELLSKGKKYVPDFYRSDLQAEFNAIWEYQKQFYADILDDELYNALKGQGQQNSRKRFLAIKGVYTAENKGKRDDVKLRHYKWRSEAISKKINIEEVAYVLVEINNDLNKSSGYLGAISDRSKELYFNKETVGENLWKQIQKNPHTSLKNQVFYRQDYLDEFEQIWETQAQFHPQLTLALKEQIRDVIIFYQRKLKSQKGLLSFCQFESWEIERKDENGNVILNKTTQLPKRQTVGRRVAPKSSPLFQEFKIWQNINNLEVTKISEGASKNKKETETLSDDERKLLFEELNLRGNLSQKEVLQILGLKDKEYKTNFSEGLEGNRTNAALFNIYQQIAENEGYGFDWSKKSAQEIKEELKAVFPQIGIQADILDFNANLDGKEFENQASYQLWHLLYSAEEDDKINEEDQIIYGNSAVSLKKKLCEKFGFTPEYAKWIANVSLQDDYGNLSTKAMRKIIPYLIDGNDYSEACALAGYNHSNSLTKEENDNRELLDKLELLPKNSLRNPVVEKILNQMVNVVNQVIETYGKPDEVRIELARELKKSAEKRAEMTKSINEATRRNEDIKKLITKDFGIPNPTKSDVVRYRLWEELAPLAYKDVFTGKQIKKEDLFSSKIDIEHIIPKALLFDDSFSNKTLVFRETNLKKADRTAYDFIESDYNATLDDYIQRVETLYNNTKGTISKGKRNKLLMAQKNLPDGFIERDLRNSQYIAKKAKAMLYQVFKDVNVTSGSITDRLREDWDLINVMKELNFPKYKALGLTEIEERYDIGQEKTKRVEVITDWTKRNDHRHHAMNALTVAFTTSSHIQYLNYLNARKNESHKEHKNIKGIENKITHKQKDKRKFIPPMPNFREEAKKHIETILVSIKNKNKVYTKNINKTKKKSGHNTKEQLTPRGQLHKETVYGKSKRPMSKPTKINKNFSLEQAQLIINVQEKELVLRHLAQFDNNPAVAFDTKTLKKMPLLKNGEPLKEVLCFEEIFTIRKDITPDLKIEKVVDEKIKAILEQRKKDFGGNAKEAFSDLDKNPIWLNKKKGICIKRVTITGVSNAEALHHQKDHLGREILDDNGNPIPADFVSTGNNHHLAVYLDSEGKLQDNIVSFYEAVVRTSQGLPVVDKGLNKDLGWKFLFSLKQNEMFVFPNDDFDINDFDLLDDKKAELISKHLYRVQKISKVSAGNSFVRDIVFRHHLETTVKEVKELKDISYIQLKSLEGLRNIKKVRINHIGKIVQVGEY

SEQ ID NO: 1159 - protein, 1145 aa, Riemerella anatipestifer
MKTILGLDLGTNSIGWALVKETENSNEKSEIIKLGVRVNPLTVDEKTNFEAGRPLSTNADRTAKRSARRNLQRYKLRRKNLIDLLIKHRLIDKDTPLTEIGKNTTHQTLELRAKAARERIELEDLARVFLAINKKRGYRSSRKVNNEEEGQVVDGMAVAKKLYDENLTPGQYAYELLSKGKKYVPDFYRSDLQAEFDSIWEYQKQFYADILDDELYNALKGQGQQNSRKRFLAIKGVYTAENKGKRDEVKLQHYKWRSEAITQKLSIEEVAYVLVEINNDLNKSSGYLGAISDRSKELYFNKETVGENLWKQIQKNPHTSLKNQVFYRQDYLDEFEQIWETQAQFHPQLTLALKEQIRDVVIFYQRKLKSQKGLLSFCQFESWEIERKDENGNVILNKTTQLPKRQTVGRRVAPKSSPLFQEFKIWQNINNLEIAKISDGNSKNKKETEALSDDERKLLFEELNLRGNLSQKEVLQILGLKDKEYKTNFPEGLEGNRTNAALFNIYQQIAENEGYGDWTKKSAQEIKEELKAVFPQIGIQADILDFNAELDGKEFENQASYQLWHLLYSAEEDDKINEEDQIIYGNSAVSLKKKLCEKFGFTPEYAKWIANVSLQDDYGNLSTKAMRKIIPYLIDGNDYSEACALAGYNHSNSLTKEENDNRERLNKLELLPKNSLRNPVVEKILNQMVNVVNQVIETYGKPDEVRIELARELKKSAEERAEMTKGINEATRRNEDIKKLITKNFGIPNPTKNDVVRYRLWEELAPLAYKDVFTGRQIKKEDLFSSKIDIEHIIPKALLFDDSFSNKTLAFRETNLKKADRTAYGFIESDYNATLDDYIQRVETLYNNAKGTISKGKRNKLLMAQKNLPDGFIERDLRNSQYIAKKAKSMIEKVFNDVNVTSGSITDRLREDWDLINVMKELNFPKYKALGLTEIEERYDIGQEKTKKVEVITDWTKRNDHRHHAMDALTVAFTTKSHVQYLNNLNTIHSLKGDEVDLELSKLYGLKNTITEVVNKKRKFIPPMPNFREEAKKHIETILVSIKNKNKVYTKNINKTKKESGYHTKEQLTPRGQLHKETVYGKSKRPMNKPTKINKNFSLEQAQLIINVQEKELVLRHLAQFDNNPAVAFDTKTLKKCHYLKMVNL

SEQ ID NO: 1160 - protein, 1400 aa, Riemerella anatipestifer
MKTILGLDLGTNSIGWALVKETENSNEKSEIIKLGVRVNPLTVDEKTNFEAGRPLSTNADRTAKRSARRNLQRYKLRRKNLIDLLIKHRLIDKDTPLTEIGKNTTHQTLELRAKAARERIELEDLARVFLAINKKRGYRSSRKVNNEEEGQVVDGMAVAKKLYDENLTPGQYAYELLSKGKKYVPDFYRSDLQAEFDSIWEYQKQFYADILDDELYNALKGQGQQNSRKRFLAIKGVYTAENKGKRDEVKLQHYKWRSEAITQKLSIEEVAYVLVEINNDLNKSSGYLGAISDRSKELYFNKETVGENLWKQIQKNPHTSLKNQVFYRQDYLDEFEQIWETQAQFHPQLTLALKEQIRDVVIFYQRKLKSQKGLLSFCQFESWEIERKDENGNVILNKTTQLPKRQTVGRRVAPKSSPLFQEFKIWQNINNLEIAKISDGNSKNKKETEALSDDERKLLFEELNLRGNLSQKEVLQILGLKDKEYKTNFPEGLEGNRTNAALFNIYQQIAENEGYGDWTKKSAQEIKEELKAVFPQIGIQADILDFNAELDGKEFENQASYQLWHLLYSAEEDDKINEEDQIIYGNSAVSLKKKLCEKFGFTPEYAKWIANVSLQDDYGNLSTKAMRKIIPYLIDGNDYSEACALAGYNHSNSLTKEENDNRERLNKLELLPKNSLRNPVVEKILNQMVNVVNQVIETYGKPDEVRIELARELKKSAEERAEMTKGINEATRRNEDIKKLITKNFGIPNPTKNDVVRYRLWEELAPLAYKDVFTGRQIKKEDLFSSKIDIEHIIPKALLFDDSFSNKTLAFRETNLKKADRTAYGFIESDYNATLDDYIQRVETLYNNAKGTISKGKRNKLLMAQKNLPDGFIERDLRNSQYIAKKAKSMIEKVFNDVNVTSGSITDRLREDWDLINVMKELNFPKYKALGLTEIEERYDIGQEKTKKVEVITDWTKRNDHRHHAMDALTVAFTTKSHVQYLNNLNTIHSLKGDEVDLELSKLYGLKNTITEVVNKKRKFIPPMPNFREEAKKHIETILVSIKNKNKVYTKNINKTKKESGYHTKEQLTPRGQLHKETVYGKSKRPMNKPTKINKNFSLEQAQLIINVQEKELVLRHLAQFDNNPAVAFDTKTLKKMPLLKNGEPLKEVLCFEEIFTIRKDITPDLKIEKVVDEKIKAILEQRKKDFGGNAKEAFSDLDKNPIWLNKEKGICIKRVTITGVSNAEALHHQKDHLGREILDDNGNPIPADFVSTGNNHHVAIYEDEKGKLQEKVVSLYEAVARANQGLPVVDKGLNEDLGWKFLFTMKQNEMFVFPNDDFDVNDIDLLDENNAKIISQHLFRVQKLATKNYMFRHHLETNVQEVKELNDIAYKSIRSTEPLKNIKKVRINHIGKIVQVGEY

SEQ ID NO: 1161 - protein, 1128 aa, Roseburia intestinalis
MDEKMDYRIGLDIGIASVGWAVLQNNSDDEPVRIVDLGVRIFDTAEIPKTGESLAGPRRAARTTRRRLRRRKHRLDRIKWLFENQGLINIDDFLKRYNMAGLPDVYQLRYEALDRKLTDEELAQVLLHIAKHRGFRSTRKAETAAKENGAVLKATDENQKRMQEKGYRTVGEMIYLDEAFRIGCSWSEKGYILTPRNKAENYQHTMLRAMLVEEVKEIFSSQRRLGNKKATEELEEKYLEIMTSQRSFDLGPGMQPDGKPSPYAMEGFSDRVGKCTFLGDQGELRGAKGTYTAEYFVALQKINHTKLVNQDGETRNFTEEERRALTLLLFTQKEVKYAAVRKKLGLPEDILFYNLNYKKAATKEEQQKENQNTEKAKFIGMPYYHDYKKCLEERVKYLTENEVRDLFDEIGMILTCYKNDDSRTERLAKLGLVPIEMEGLLAYTPTKFQHLSMKAMRNIIPFLEKGMTYDKACEEAGYDFKADSKGTKQKLLTGENVNQTINEITNPVVKRSVSQTVKVINAIIRTYGSPQAINIELAREMSKTFEERRKIKGDMEKRQKNNEDVKKQIQELGKLSPTGQDILKYRLWQEQQGICMYSGKTIPLEELFKPGYDIDHILPYSITFDDSFRNKVLVTSQENRQKGNRTPYEYMGNDEQRWNEFETRVKTTIRDYKKQQKLLKKHFSEEERSEFKERNLTDTKYITTVIYNMIRQNLEMAPLNRPEKKKQVRAVNGAITAYLRKRWGLPQKNRETDTHHAMDAVVIACCTDGMIQKISRYTKVRERCYSKGTEFVDAETGEIFRPEDYSRAEWDEIFGVHIPKPWETFRAELDVRMGDDPKGFLDTHSDVALELDYPEYIYENLRPIFVSRMPNHKVTGAAHADTIRSPRHFKDEGIVLTKTALTDLKLDKDGEIDGYYNPQSDLLLYEALKKQLLLYGNDAKKAFAQDFHKPKADGTEGPVVRKVKIQKKQTMGVFVDSGNGIAENGGMVRIDVFRVNGKYYFVPVYTADVVKKVLPNRASTANKPYSEWRTMEDKDFLFSLYSRDLVHIKSKKGIPIKNVDGSLGESKEVYAYYIGADISGAKIEGKAHDSRYTFRGIGVQKLELIEKCQVDILGHISTVKNEKRMGFS

SEQ ID NO: 1162 - protein, 1471 aa, Scardovia wiggsiae
MGYKAPRNDKGEIDYGVGLDLGNGSVGWVAMDKDYHLIRARGHELIGARLFDPANSAENRRESRTTRRRLSRRRWRLRMLDSLFASELAKIDPNFLARRKYSWVHPKDEQNHENWYGSIIFGSKEQDKQFYKDYPTIYHLRKKLTEDTERHDIREIYVAIHHIVKYRGHFLREGEINSENLFDPEGFVELIKDVIKLNNSYDESTPIFEASPADVSEALLNEHTSRSGRIEDTLDKLDFSVSRVDKHELKGMRDAAKAVIGAIVGNTADFSKIFNLDNLDKDSKDNLKLKFADSNFDEKYGGVVGSGLLDETQIELVDRIHAVYDAVALKGILGDAHTISEAKVESYEKHRKNWKLIKEELRTKENKDEVDLWYGDLSGRQYKNPPDPEKGPDEGSKKDSPIRDSDQKQNLIKKANDYFTELIDDSQLSEEQKNCLKNDINNGQLFPVQRSSDNGVIPYQIHLNELRRIIENQKQYYPFLAETFIRKTAEGKSYEENKIVALLKFRVPYYVGPLVSKEDMEEHSSGNSAYHWMARNPGRGEAITPWNFDEVVDKDESGARFISRLTGTDTYLLGEPTLPQHSLLYEEYMVLSELNNVRLNVRQGNHWSDKNRQRLSYKQKEFLIENLFKEHKTVTRKRAEDCLSSMGCGEVQLFGLSDEKKFASSLSSYITLKKILGKAFVDDSGNSAILERIIEVQTVFEDREPLTHQLSLIDSLTVEQRKQLAKIHYTGWGKLSRKLLTSKKGSYKIHSQNEIMRTQHSIIDIMRGDSLNLIEIIRDKKIGIGEWIDNENLDRETGESDVSRLESVFEGIVMSPRVKRGVVQAVRVIDDLAKAIGNPPQRIFIEMADEVQASQRTVSRLSRLKALYGSPSLQKEFNDLKDLRKSLNETKDADLQEDRLYLYYIQLGKDLYTGKEISIDSLSSAYDIDHIVPQALTQDDSIDNRVLVSRKENARKTDSYLYTPDLIKNMRPLWGKLLAAGLMSQKKYDALTRVDDFKDREKQRFVQRSLVETRQIMKNVSTILRTYYGEDTNVVTLKSSITHDMRKYLGFPYKNRDINDYHHAQDALCISAAGQFMLNRHFVSGGEVTDGASNAYNMYLAEYLQEFRDAKARGERKRSTAFGFVVGSMSSKDDEKRTDHRTGEIVWSETNAEYLRKVMNYKKMLITQKVGDVKTRALYDETRYGHKESSAKSIKFDNLRRDTSLYGGFSGASTAYMMLVEYKKKNKLVSITAQEASLLAVADQKNDTVSVMDGILASHGLSGAKILLPKIVTGQLLDYSDALVTLQSASELNTARQMWLPRNDYNDIDIILKSKDIEDAAHKLGYDSDTVHVLRRIQKLFEAVFRVAESQFPLHQLSKDQQEEILRDPQNYGFGSAVKLLGGLLKALHANAENTNLAGLVKVLHGDKEYSDDGKAKEFKKFGFSPRWRRISNPTGFTLSDSDTFIYQSPSGIFEQRVTVKELKEKADKQK

SEQ ID NO: 1163 - protein, 116 aa, Sphingobacterium spiritivorum
MFRKYFEEKNSARLLFTLKQGDFVYVPDDNEEVILDESSPLFIDYWKNISERSNNIHVVQKFSGKEIYFLKHTIADTIAKKIEFGSQDCYQSLNGKSIKEFCIKIDSDRLGNISKV

SEQ ID NO: 1164 - protein, 1306 aa, Sphingobacterium spiritivorum; identical to SEQ ID NO: 93

SEQ ID NO: 1165 - protein, 1110 aa, Sphingobium sp.
MAEGKKRIWRLGADLGANSLGWAAIELSAPVNGKPIAILAAGSRIFSDGRDPKSGASLAVDRRDARAMRRRRDRFKQRQKALIKYLIADGLFPADEAARNAMAAIDPYAVRARALDEALSLPELGRALFHLNQRRGFKSNRKADRKADDDAGKIAIGIDRTRDAIAEDEADAGAEPGSWTFGKWLHERRLKGQSVRTRLRPESGEDAKGDGYDFYPDRALMEEEFDAIWAAQAPHHPDVLTNDVHDRLHEIIFYQRPLKAPQVGMCSLIPGDRRLPKAHPLFQRRRLLEELNALMIVRPGEVAQRLTREERDILLLKLKDKNKVSFATLRKALKLDPDARFNKESEDRTDLKGDEVAAVMGSKTRFGNLWVHLSIEAQWDVLARLDAVESDAEDAAFCAWLVETYALTPEQARAVANAPLPPGYGRFGETATRKLIEALRDGKKDDRVLVYSEAVTEAGLGHHSDRRTGEVFEDAKGRPQLPYYGVALERHIMPGTGDPSDPEEMRVGRLTNPTVHIGLNQLRRILNVLIRAYGPPAEIAIELARELKLTDEDKKRINRENNDNRIAAERRSEKLLAIGQADSGANRALLKLWEELNPANVLDRRCIYSGRQISIDMLFSAAVEVDHILPFAATLDDSNGNKIVCLREANREKRKRSPHDAWGHSARWDEIAARAAQLPRNKRWRFEPDAMDKFRDEGGFQARHLVDTQYLARLSREYLATLYPEKGEGSGHIWVSPGRLTEMVRRKLGLNDLLPDHNFGGGADQAKNRLDHRHHAIDAVVVAIVDRGMLNAIARASGQEGAEGRERIIIPEPWDGFRDALRETVNRITVSHRTDHGTASKAGLPKGKDATAGRLHNDTAYGFTGDTDAKGNSIVVRRVPLSSFKKLADLDRIRDADLKAALYQHLNGLEGKAFEKALAEFHKLEWHNFGGVRRVRVTEPLTVIPIKDRNGRIYKGYKGDSNYRYDVWELPDGKWVTNWKNEAGEAMSSVISMFDAHQSSEPPRPHPAARKILSLHQNDLLAIEREGEDRKLMRVVKFGQSGQITLAEHQQAGDLKKRDAVSNDDDPFKYFAPTSGGLKKVKARQVRIDEIGRVLDPGFPARTARRKTRG

SEQ ID NO: 1166 - protein, 1084 aa, Sporolactobacillus vineae
MKYSIGLDIGISSVGWSVINLDRERIELMGARLFDAAENPKNGSSLAAPRRDARSARRRLRRRRYRVGRVRHFIIDRGLVTRGQADQLFDWKDGDLDIWLVRVNALERLLTDREFARVLIHIAKNRGYRSNRKSEAKSGENGQVLSAIKANKELMEEKGYQTVAEMLVNEPETFAGRKRNRGGEYTHVIARSELEHEIRLIFTKQRAFGNRFATEENENTYVKIWAAQRPVATKDDILKKIGDCTFEKGEKRAPKASYAFQYFRALDKLNRLRILSVREPSRNLTDDERNLIVPALFNHDKQKYSDLRKILQLRDDQKFNELFYDPGKSLKENENKTFLSLAEQYKIRKVIRDVQGKDGLLQYRPLDIDTIAYALTVFKDDQDTRDYLSNTFVNGNGKQVLNLANRAFDAELIDGLLSLSFAKFGHLSLKALHKLIPHMEQGLSYYDACKKVGYHDNEQVGKSKQHLLPVIPADEIRNPVVVRSLSQTRKVINAIIKRYGSPTFMYIELAREMGRPYNERRDLEKQYNKNRTVNDSAIEQIHELYPEIGAPRGHDILKYKLWQQQDCKCAYSLEKIPAEKIFEPGYAEVDHIIPYSRSFDDSNSNKVLVLSRMNQEKKNRTPYEWFGGDEHRWNKFESYVNALKVNRKKKSLLTKKNMDTEEEDTFKSRHLNDTRYITRFIKSFVEDNLLFREIEGAKQHVFTVNGAYTSLMRKRWGFNKNREESDLHHSVDAVIIAVSQPFRNEVSRYFKHREISLPQLLKRTWDYFPEPWEGFVKELRARTLQDPEKLKLALESLDLDSYDPEFIDEVKPIFISRMPKRSIKGQIHDETLRRNRGKTKDGFVKIVTRTRLENIKFDKNGDFPMYGRESDPKTYQAIKQRYLENNKDKKKAFIEPLYKPAKNPNNASLIRSVKIEDKANQIVPLRDEAVAYNASIVRTEVYRNKETGKFYLAPVYVSDVFAGREPRRFIRANVPYEQWVNITDKFTFLFNLYPNDVIYIKMKKVKTTKSNINKTISWQESYFYFKGTDIHTGAITIIDHMNSFTDRVGTQGLQLFEKYQVDPLGNLSRVHGETQYGVPALSHS

SEQ ID NO: 1167 - protein, 475 aa, Staphylococcus massiliensis
MGQDYILGLDIGITSVGYGLIDYHDKSVIDAGVRLFKEANVENNEGRRSKRGSRRLQRRRKHRLARTRNLLESYQLNPFPKCEKNPYEIRVKGFKEVLTSDELSAALLHLAKRRGIDNVHVTDTESDSSDNGLSTKEQLAKNQKALESRYVCELQLERLLNDNKVRGANNRFKTQDFVREAKQILSIQKDHHNLDQVFIDKYISLLETRREYYEGPGKGSPYGWDGDIKKWYELLMGRCTYFPESLRSVKYAYSADLFNALNDLNNLVIVRDENDKLTYPEKYHIVENVFKQRKKPTLKQIAKEIDVAPEDIRGYRVTASGTPVFTSFKLYHDIKSVTSNDKVLEDTELLDAIAEVLTIYQSPIEVQEKLESLNVILTKEEIEGISKLTGYTGTHALSLKAIQIVIDELWETNDNQMTIFTRLNMKPQKVDLAKANKIPTSLVEDFIISPVAKRAFIQSIKVINAVIKNMVCLKI

SEQ ID NO: 1168 - protein, 581 aa, Staphylococcus massiliensis
MPKDIIIELAREKNSDEERKIIRDVQKRNQQTRDLVDKVIKETGKTKAKGMVEKLILHDKQEGKCLYSLKSIPLEDLLNNPHHYEVDHIIPRSVSYDNSMNNKVLVLQEENSKKSNQTPFQYFNSSNTHITFKQFKQHVLNLSKTKDRITKKKKEYLLEERDINKFSVQKEFINRNLVDTRYATRELMTLLRAYFSANELDVKVKAINGGFTSYLRKRWDFKKDRNAGYKHHAEDALIIANVDFIFKQLKALDNAKKVMEGRKVQVEKDNVEDNEHYESLFREPDQIKEIKLYDNYKFSHRVDKKPNRELINDTIYSTRKVDNKTYTIQTVNNIYDKQNDQLKKLFNKSPEKFLMYKHDPKTFDKLATIMRQYKNEKNPLYKFHDETGEYLTKYAKKDNGPIVKSLKYIGKQVNAHLDITNDYENSNNKVVKLSLKPFRFDVYLDDGKYKFVTVKYLDIIKKDTYYVIDEEKYKLALQQKKISENAKFIGSFYNNDLIKINGELLRVIGVNDDAKNTLELNMIDISYRDYVENMNLATTPRIRKNIGKSITILEKYTTDILGNTFKISSPEKPQFIFKVRD

SEQ ID NO: 1169 - protein, 1334 aa, Staphylococcus pseudintermedius; identical to SEQ ID NO: 200

SEQ ID NO: 1170 - protein, 1112 aa, Staphylococcus simulans; identical to SEQ ID NO: 247

SEQ ID NO: 1171 - protein, 773 aa, Streptococcus agalactiae
MNKPYSIGLDIGTNSVGWSIITDDYKVPAKKMRVLGNTDKEYIKKNLIGALLFDGGNTAADRRLKRTARRRYTRRRNRILYLQEIFAEEMSKVDDSFFHRLEDSFLVEEDKRGSKYPIFATLQEEKDYHEKFSTIYHLRKELADKKEKADLRLIYIALAHIIKFRGHFLIEDDSFDVRNTDISKQYQDFLEIFNTTFENNDLLSQNVDVEAILTDKISKSAKKDRILAQYPNQKSTGIFAEFLKLIVGNQADFKKYFNLEDKTPLQFAKDSYDEDLENLLGQIGDEFADLFSAAKKLYDSVLLSGILTVIDLSTKAPLSASMIQRYDEHREDLKQLKQFVKASLPEKYQEIFADSSKDGYAGYIEGKTNQEAFYKYLSKLLTKQEDSENFLEKIKNEDFLRKQRTFDNGSIPHQVHLTELKAIIRRQSEYYPFLKENQDRIEKILTFRIPYYIGPLAREKSDFAWMTRKTDDSIRPWNFEDLVDKEKSAEAFIHRMTNNDFYLPEEKVLPKHSLIYEKFTVYNELTKVRYKNEQGETYFFDSNIKQEIFDGVFKEHRKVSKKKLLDFLAKEYEEFRIVDVIGLDKENKAFNASLGTYHDLEKILDKDFLDNPDNESILEDIVQTLTLFEDREMIKKRLENYKDLFTESQLKKLYRRHYTGWGRLSAKLINGIRDKESQKTILDYLIDDGRSNRNFMQLINDDGLSFKSIISKAQAGSHSDNLKEVVGELAGSPAIKKGILQSLKIVDELVKVMGYEPEQIVVEMARENQTTNQ

SEQ ID NO: 1172 - protein, 1370 aa, Streptococcus agalactiae
MNKPYSIGLDIGTNSVGWSIITDDYKVPAKKMRVLGNTDKEYIKKNLIGALLFDGGNTAADRRLKRTARRRYTRRRNRILYLQEIFAEEMSKVDDSFFHRLEDSFLVEEDKRGSKYPIFATMQEEKDYHEKFPTIYHLRKELADKKEKADLRLVYLALAHIIKFRGHFLIEDDRFDVRNTDIQKQYQAFLEIFDTSFENNHLLSQNVDVEAILTDKISKSAKKDRILAQYPNQKSTGIFAEFLKLIVGNQADFKKHFNLEDKTPLQFAKDSYDEDLENLLGQIGDEFADLFSAAKKLYDSVLLSGILTVTDLSTKAPLSASMIQRYDEHREDLKQLKQFVKASLPEKYQEIFADSSKDGYAGYIEGKTNQEAFYKYLSKLLTKQEDSEYFLEKIKNEDFLRKQRTFDNGSIPHQVHLTELKAIIRRQSEYYPFLKENQDKIEKILTFRIPYYVGPLARGNSDFAWMTRKTDDSIRPWNFEDLVDKEKSAEAFIHRMTNNDLYLPEEKVLPKHSLIYEKFTVYNELTKVRYKNEQGETYFFDSNVKQEIFDGVFKEHRKVSKKQLLDFLAKEFEEFRIVDVTGLDKENKAFNASLGTYHDLKKILDKDFLDNPDNESILEDIVQTITLFEDREMIKKRLENYKDLFTESQLKKLYRRHYTGWGRLSAKLINGIRDRESQKTILDYLISDGRANRNFMQLINDDGLSFKSIISKAQSGSHSDNLKEVVGELAGSPAIKKGILQSLKIVDELVKVMGYEPEQIVVEMARENQTTNQGRRNSRQRYKLLEDGVKNLASDLNGDILKEYPTDNQALQNERLFLYYLQNGRDMYTGEALDIDNLSQYDIDHIVPQAFIKDDSIDNRVLVSSAKNRGKSDDVPSIDIVKARKAFWKKLLDAKLISQRKYDNLTKAERGGLTPDDKAGFIQRQLVETRQITKHVARILDERFNNKVDDNNKPIRKVKIVTLKSNLVSNFRKEFGFYKIREVNNYHHAHDAYLNAVVAKAILTKYPQLEPEFVYGDYPKYNSYKTRKSATEKLFFYSNIMNFFKTKVTLADETVVVKDDIEVNNETGEIAWDKKKHFATVRKVLSYPQVNIVKKTEVQTGGFSKESILAHSNSDKLIPRKTKDIYLDPKKYGGFDSPIVAYSVLVLADIKKGKAQKLKTVKELIGITIMERERFEKNPSAFLESKGYLNIRTDKLIILPKYSLFELENGRRRLLASAGELQKGNELALPTQYMKFLYLASRYNESKGKPEEIEKKQEFVNQHVSYFDDILQLINDFSKRVILADANLEKINKLYSDNKDNTPVDELAKNIINLFTFTSLGAPAAFKFFDKSVDRKRYTSTKEVLDSTLIHQSITGLYETRIDLGKLGED

SEQ ID NO: 1173 - protein, 1370 aa, Streptococcus agalactiae
MNKPYSIGLDIGTNSVGWSIITDDYKVPAKKMRVLGNTDKEYIKKNLIGALLFDGGNTAADRRLKRTARRRYTRRRNRILYLQEIFAEEMSKVDDSFFHRLEDSFLVEEDKRGSKYPIFATMQEEKDYHEKFPTIYHLRKELADKKEKADLRLVYLALAHIIKFRGHFLIEDDRFDVRNTDIQKQYQAFLEIFDTSFENNHLLSQNVDVEAILTDKISKSAKKDRILAQYPNQKSTGIFAEFLKLIVGNQADFKKHFNLEDKTPLQFAKDSYDEDLENLLGQIGDEFADLFSAAKKLYDSVLLSGILTVTDLSTKAPLSAYMIQRYDEHREDLKQLKQFVKASLPEKYQEIFADSSKDGYAGYIEGKTNQEAFYKYLSKLLTKQEDSEYFLEKIKNEDFLRKQRTFDNGSIPHQVHLTELKAIIRRQSEYYPFLKENQDKIEKILTFRIPYYVGPLARGNSDFAWMTRKTDDSIRPWNFEDLVDKEKSAEAFIHRMTNNDLYLPEEKVLPKHSLIYEKFTVYNELTKVRYKNEQGETYFFDSNVKQEIFDGVFKEHRKVSKKQLLDFLAKEFEEFRIVDVTGLDKENKAFNASLGTYHDLKKILDKDFLDNPDNESILEDIVQTITLFEDREMIKKRLENYKDLFTESQLKKLYRRHYTGWGRLSAKLINGIRDRESQKTILDYLISDGRANRNFMQLINDDGLSFKSIISKAQSGSHSDNLKEVVGELAGSPAIKKGILQSLKIVDELVKVMGYEPEQIVVEMARENQTTNQGRRNSRQRYKLLEDGVKNLASDLNGDILKEYPTDNQALQNERLFLYYLQNGRDMYTGEALDIDNLSQYDIDHIVPQAFIKDDSIDNRVLVSSAKNRGKSDDVPSIDIVKARKAFWKKLLDAKLISQRKYDNLTKAERGGLTPDDKAGFIQRQLVETRQITKHVARILDERFNNKVDDNNKPIRKVKIVTLKSNLVSNFRKEFGFYKIREVNNYHHAHDAYLNAVVAKAILTKYPQLEPEFVYGDYPKYNSYKTRKSATEKLFFYSNIMNFFKTKVTLADETVVVKDDIEVNNETGEIAWDKKKHFATVRKVLSYPQVNIVKKTEVQTGGFSKESILAHSNSDKLIPRKTKDIYLDPKKYGGFDSPIVAYSVLVLADIKKGKAQKLKTVKELIGITIMERERFEKNPSAFLESKGYLNIRTDKLIILPKYSLFELENGRRRLLASAGELQKGNELALPTQYMKFLYLASRYNESKGKPEEIEKKQEFVNQHISYFDDILQLINDFSKRVILADANLEKINKLYSDNKDNTPVDELAKNIINLFTFTSLGAPAAFKFFDKSVDRKRYTSTKEVLDSTLIHQSITGLYETRIDLGKLGED

SEQ ID NO: 1174 - protein, 1378 aa, Streptococcus agalactiae
MNKPYSIGLDIGTNSVGWSIITDDYKVPAKKMRVLGNTDKEYIKKNLIGALLFDGGNTAADRRLKRTARRRYTRRRNRILYLQEIFAEEMSKVDDSFFHRLEDSFLVEEDKRGSKYPIFATMQEEKYYHEKFPTIYHLRKELADKKEKADLRLIYLALAHIIKFRGHFLIEDDRFDVRNTDIQKQYQAFLEIFDTTFENNDLLSQNVDVEAILTDKISKSAKKDRILARYPNQKSTGIFAEFLKLIVGNQADFKKHFNLEDKTPLQFAKDSYDEDLENLLGQIGDEFADLFSAAKKLYDSVLLSGILTVIDLSTKAPLSASMIQRYDEHHEDLKHLKQFVKASLPENYREVFADSSKDGYAGYIEGKTSQEAFYKYLLKLLTKQEGSEYLLEKIKNEDFLRKQRTFDNGSIPHQVHLTELRAIIRRQSEYYPFLKENLDRIEKILTFRIPYYVGPLAREKSDFAWMTRKTDDSIRPWNFEDLVDKEKSAEAFIHRMTNNDLYLPEEKVLPKHSLIYEKFTVYNELTKVRFLAEGFKDFQFLNRKQKETIFNSLFKEKRKVTEKDIISFLNKVDGYEGIAIKGIEKQFNASLSTYHDLKKILGKDFLDNTDNELILEDIIQTLTLFEDREMIKKRLDIYKDFFTESQLKKLYRRHYTGWGRLSAKLINGIRNKENQKTILDYLIDDGSANRNFMQLIKDAGLSFKPIIDKARTGSHSDNLKEVVGELAGSPAIKKGILQSLKIVDELVKVMGYEPEQIVVEMARENQTTAKGLSRSRQRLTTLRESLGNLKSNILEEKKPKYVKDQVENHHLSDDRLFLYYLQNGKDMYTDDELDIDNLSQYDIDHIIPQAFIKDDSIDNRVLVSSAKNRGKSDDVPSIEIVKARKMFWKNLLDAKLMSQRKYDNLTKAERGGLTSDDKARFIQRQLVETRQITKHVARILDERFNNELDSKGRRIRKVKIVTLKSNLVSNFRKEFGFYKIREVNNYHHAHDAYLNAVVAKAILTKYPQLEPEFVYGLYRRKKLSKIVREDKEEKYSEATRKMFFYSNLMNMFKRVVRLADGSIVVRPVIETGRYMGKTAWDKKKHFATVRKVLSYPQNNIVKKTEIQTGGFSKESILAHGNSDKLIPRKTKDIYLDPKKYGGFDSPIVAYSVLVVADIKKGKAQKLKTVTELLGITIMERSRFEKNTSAFLESKGYLNIRDDKLMILPKYSLFELENGRRRLLASAGELQKGNELALPTQFMKFLYLASRYNESKGKPEEIEKKQEFVNQHVSYFDDILQLINDFSNRVILADANLEKINKLYQDNKENIPVDELANNIINLFTFTSLGAPAAFKFFDKIVDRKRYTSTKEVLNSTLIHQSITGLYETRIDLGKLGEG

SEQ ID NO: 1175 - protein, 1370 aa, Streptococcus agalactiae
MNKPYSIGLDIGTNSVGWSIITDDYKVPAKKMRVLGNTDKEYIKKNLIGALLFDGGNTAADRRLKRTARRRYTRRRNRILYLQEIFAEEMSKVDDSFFHRLEDSFLVEEDKRGSKYPIFATMQEEKYYHEKFPTIYHLRKELADKKEKADLRLIYLALAHIIKFRGHFLIEDDRFDVRNTDIQKQYQAFLEIFDTTFENNDLLSQNVDVEAILTDKISKSAKKDRILARYPNQKSTGIFAEFLKLIVGNQADFKKHFNLEDKTPLQFAKDSYDEDLENLLGQIGDEFADLFSAAKKLYDSVLLSGILTVTDLSTKAPLSASMIQRYDEHREDLKQLKQFVKASLPEKYQEIFADSSKDGYAGYIEGKTNQEAFYKYLSKLLTKQEGSEYLLEKIKNEDFLRKQRTFDNGSIPHQVHLTELRAIIRRQSEYYPFLKENLDRIEKILTFRIPYYVGPLAREKSDFAWMTRKTDDSIRPWNFEDLVDKEKSAEAFIHRMTNNDLYLPEEKVLPKHSLIYEKFTVYNELTKVRFLAEGFKDFQFLNRKQKETIFNSLFKEKRKVTEKDIISFLNKVDGYEGIAIKGIEKQFNASLSTYHDLKKILGKDFLDNTDNELILEDIVQTLTLFEDREMIRKRLDIYKDFFTESQLKKLYRRHYTGWGRLSAKLINGIRNKENQKTILDYLIDDGSANRNFMQLIKDAGLSFKPIIDKARTGSHSDNLKEVVGELAGSPAIKKGILQSLKIVDELVKVMGYEPEQIVVEMARENQTTAKGLSRLRQRLTTLRESLANLKSNILEEKKPKYVKDQVENHHLSDDRLFLYYLQNGKDMYTDDELDIDNLSQYDIDHIIPQAFIKDDSIDNRVLVSSAKNRGKSDDVPSVEIVKDCKVFWKKLLDAKLMSQRKYDNLTKAERGGLTSDDKARFIQRQLVETRQITKHVARILDERFNNELDSKGRRIRKVKIVTLKSNLVSNFRKEFGFYKIREVNNYHHAHDAYLNAVVAKAILTKYPQLEPEFVYGDYPKYNSYKTRKSATEKLFFYSNIMNFFKTKVTLADGTVVVKDDIEVNNDTGEIVWDKKKHFATVRKVLSYPQVNIVKKTEIQTGGFSKESILAHGNSDKLIPRKTKDIYLDPKKYGGFDSPIVAYSVLVVADIKKGKAQKLKTVTELLGITIMERSRFEKNPSAFLESKGYLNIRDDKLMILPKYSLFELENGRRRLLASADELQKGNELALPTQFMKFLYLASRYNELKGKPEEIEQKQEFVVQHVSYFDDILQIINDFSNRVILADANLEKINKLYQDNKENIPVDELANNIINLFTFTSLGAPAAFKFFDKIVDRKRYTSTKEVLNSTLIHQSITGLYETRIDLGKLGED

SEQ ID NO: 1176 - protein, 1377 aa, Streptococcus agalactiae
MNKPYSIGLDIGTNSVGWSIITDDYKVPAKKMRVLGNTDKEYIKKNLIGALLFDGGNTAADRRLKRTARRRYTRRRNRILYLQEIFAEEMSKVDDSFFHRLEDSFLVEEDKRGSKYPIFATMQEEKYYHEKFPTIYHLRKELADKKEKADLRLVYLALAHIIKFRGHFLIEDDRFDVRNTDIQKQYQAFLEIFDTTFENNHLLSQNVDVEAILTDKISKSAKKDRILAQYPNQKSTGIFAEFLKLIVGNQADFKKHFNLEDKTPLQFAKDSYDEDLENLLGQIGDEFADLFSVAKKLYDSVLLSGILTVTDLSTKAPLSASMIQRYDEHHEDLKHLKQFVKASLPENYREVFADSSKDGYAGYIEGKTNQEAFYKYLLKLLTKQEGSEYFLEKIKNEDFLRKQRTFDNGSIPHQVHLTELRAIIRRQSEYYPFLKENQDRIEKILTFRIPYYVGPLAREKSDFAWMTRKTDDSIRPWNFEDLVDKEKSAEAFIHRMTNNDLYLPEEKVLPKHSLIYEKFTVYNELTKVRFLAEGFKDFQFLNRKQKETIFNSLFKEKRKVTEKDIISFLNKVDGYEGIAIKGIEKQFNASLSTYHDLKKILGKDFLDNTDNELILEDIVQTLTLFEDREMIKKCLDIYKDFFTESQLKKLYRRHYTGWGRLSAKLINGIRNKENQKTILDYLIDDGSANRNFMQLINDDDLSFKPIIDKARTGSHSDNLKEVVGELAGSPAIKKGILQSLKIVDELVKVMGYEPEQIVVEMARENQTTAKGLSRSRQRLTTLRESLANLKSNILEEKKPKYVKDQVENHHLSDDRLFLYYLQNGRDMYTKKALDIDNLSQYDIDHIIPQAFIKDDSIDNRVLVSSAKNRGKSDDVPSIEIVKARKMFWKNLLDAKLMSQRKYDNLTKAERGGLTSDDKARFIQRQLVETRQITKHVARILDERFNNEVDNGKKICKVKIVTLKSNLVSNFRKEFGFYKIREVNDYHHAHDAYLNAVVAKAILTKYPQLEPEFVYGMYRQKKLSKIVHEDKEEKYSEATRKMFFYSNLMNMFKRVVRLADGSIVVRPVIETGRYMGKTAWDKKKHFATVRKVLSYPQNNIVKKTEIQTGGFSKESILAHGNSDKLIPRKTKDIYLDPKKYGGFDSPIVAYSVLVVADIKKGKAQKLKTVTELLGITIMERSRFEKNPSAFLESKGYLNIRDDKLMILPKYSLFELENGRRRLLASAGELQKGNELALPTQFMKFLYLASRYNESKGKPEEIEKKQEFVNQHVSYFDDILQLINDFSKRVILADANLEKINKLYQDNKENIPVDELANNIINLFTFTSLGAPAAFKFFDKIVDRKRYTSTKEVLNSTLIHQSITGLYETRIDLGKLGED

SEQ ID NO: 1177 - protein, 1370 aa, Streptococcus agalactiae
  misc_feature (117)..(117): Xaa can be any naturally occurring amino acid
MNKPYSIGLDIGTNSVGWSIITDDYKVPAKKMRVLGNTDKEYIKKNLIGALLFDGGNTAADRRLKRTARRRYTRRRNRILYLQEIFAEEMSKVDDSFFHRLEDSFLVEEDKRGSKYXIFATLQEEKDYHEKFSTIYHLRKELADKKEKADLRLIYIALAHIIKFRGHFLIEDDSFDVRNTDISKQYQDFLEIFNTTFENNDLLSQNVDVEAILTDKISKSAKKDRILAQYPNQKSTGIFAEFLKLIVGNQADFKKYFNLEDKTPLQFAKDSYDEDLENLLGQIGDEFADLFSAAKKLYDSVLLSGILTVIDLSTKAPLSASMIQRYDEHREDLKQLKQFVKASLPEKYQEIFADSSKDGYAGYIEGKTNQEAFYKYLSKLLTKQEDSENFLEKIKNEDFLRKQRTFDNGSIPHQVHLTELKAIIRRQSEYYPFLKENQDRIEKILTFRIPYYIGPLAREKSDFAWMTRKTDDSIRPWNFEDLVDKEKSAEAFIHRMTNNDFYLPEEKVLPKHSLIYEKFTVYNELTKVRYKNEQGETYFFDSNIKQEIFDGVFKEHRKVSKKKLLDFLAKEYEEFRIVDVIGLDKENKAFNASLGTYHDLEKILDKDFLDNPDNESILEDIVQTLTLFEDREMIKKRLENYKDLFTESQLKKLYRRHYTGWGRLSAKLINGIRDKESQKTILDYLIDDGRSNRNFMQLINDDGLSFKSIISKAQAGSHSDNLKEVVGELAGSPAIKKGILQSLKIVDELVKVMGYEPEQIVVEMARENQTTNQGRRNSRQRYKLLDDGVKNLASDLNGNILKEYPTDNQALQNERLFLYYLQNGRDMYTGEALDIDNLSQYDIDHIIPQAFIKDDSIDNRVLVSSAKNRGKSDDVPSLEIVKDCKVFWKKLLDAKLMSQRKYDNLTKAERGGLTSDDKARFIQRQLVETRQITKHVARILDERFNNELDSKGRRIRKVKIVTLKSNLVSNFRKEFGFYKIREVNNYHHAHDAYLNAVVAKAILTKYPQLEPEFVYGDYPKYNSYKTRKSATEKLFFYSNIMNFFKTKVTLADGTVVVKDDIEVNNDTGEIVWDKKKHFATVRKVLSYPQNNIVKKTEIQTGGFSKESILAHGNSDKLIPRKTKDIYLDPKKYGGFDSPIVAYSVLVVADIKKGKAQKLKTVTELLGITIMERSRFEKNPSAFLESKGYLNIRADKLIILPKYSLFELENGRRRLLASAGELQKGNELALPTQFMKFLYLASRYNESKGKPEEIEKKQEFVNQHVSYFDDILQLINDFSKRVILADANLEKINKLYQDNKENISVDELANNIINLFTFTSLGAPAAFKFFDKIVDRKRYTSTKEVLNSTLIHQSITGLYETRIDLGKLGED

SEQ ID NO: 1178 - protein, 1370 aa, Streptococcus agalactiae
MNKPYSIGLDIGTNSVGYSVVTDDYKVPAKKMRVLGNTDKEYIKKNLIGALLFDGGNTASDRRLKRTARRRYTRRRNRILYLQEIFAEEMSKVDDSFFHRLEDSFLVEDDKRGSKYPIFATMQEEKDYHEKFPTIYHLRKELADKKEKADLRLVYLALAHIIKFRGHFLIEDDSFDVRNTDIQRQYQAFLEIFDTTFENNHLLSQNIDVEGILTDKISKSAKKDRILAQYPNQKSTGIFAEFLKLIVGNQADFKKHFNLEDKTPLQFAKDSYDEDLENLLGQIGDEFADLFSVAKKLYDSVLLSGILTVTDLSTKAPLSASMIQRYDEHREDLKQLKQFVKASLPEKYQEIFTDSSKDGYAGYIEGKTNQGAFYKYLSKLLTKQEGSEYFLEKIKNEDFLRKQRTFDNGSIPHQVHLTELKAIIRRQSEYYPFLKENLDRIEKILTFRIPYYVGPLAREKSDFAWMTRKTDDSIRPWNFEELVDKEASAEAFIHRMTNNDLYLPEEKVLPKHSLIYEKFTVYNELTKVRYKNEQGETYFFDSNIKQEIFDGVFKEHRKVSKKKLLDFLAKEYEEFRIVDVIGLDKENKAFNASLGTYHDLKKILDKDFLDNPDNESILEDIVQTLTLFEDREMIKKRLENYKDLFTESQLKKLYRRHYTGWGRLSAKLINGIRDKESQKTILDYLISDGRANRNFMQLIHDDGLSFKPIIDKAQAGSHSDNLKEVVGELAGSPAIKKGILQSLKIVDELVKVMGYEPEQVVVEMARENQTTNQGRRNTRQRYKLLEEGVKNLASDLNGNILKEYPTDNQALQNERLFLYYLQNGRDMYTGEALDIDNLSQYDIDHIVPQAFIKDDSIDNRVLVSSAKNRGKSDNVPSIDIVKARKAFWKKLLDAKLMSQRKYDNLTKAERGGLTSDDKARFIQRQLVETRQITKHVARILDERFNNELDSKGRRIRKVKIVTLKSNLVSNFRKEFGFYKIREVNDYHHAHDAYLNAVVAKAILTKYPQLEPEFVYGDYPKYNSYKTRKSATEKLFFYSNIMNFFKTKVTLADGTVVVKDDIEVNNDTGEIVWDKKKHFATVRKVLSYPQVNIVKKTEIQTGGFSKESILAHGNSDKLIPRKTKDIYLDPKKYGGFDSPIVAYSVLVVADIKKGKAQKLKTVTELLGITIMERFRFEKNPSAFLESKGYLNIRDDKLMILPKYSLFELENGRRRLLASAGELQKGNELALPTQYMKFLYLASRYNELKGKPEEIEQKQEFVVQHVSYFDDILQIINDFSNRVILADANLEKINKLYQDNKENISVDELANNIINLFTFTSLGAPAAFKFFDKIVDRKRYTSTKEVLNSTLIHQSITGLYETRIDLGKLGED

SEQ ID NO: 1179 - protein, 1370 aa, Streptococcus agalactiae
MNKPYSIGLDIGTNSVGYSVVTDDYKVPAKKMRVLGNTDKEYIKKNLIGALLFDGGNTASDRRLKRTARRRYTRRRNRILYLQEIFAEEMSKVDDSFFHRLEDSFLVEDDKRGSKYPIFATMQEEKDYHEKFPTIYHLRKELADKKEKANLRLVYLALAHIIKFRGHFLIEDDSFDVRNTDIQRQYQAFLEIFDTTFENNHLLSQNIDVEGILTDKISKSAKKDRILAQYPNQKSTGIFAEFLKLIVGNQADFKKHFNLEDKTPLQFAKDSYDEDLENLLGQIGDEFADLFSVAKKLYDSVLLSGILTVTDLSTKAPLSASMIQRYDEHREDLKQLKQFVKASLPEKYQEIFTDSSKDGYAGYIEGKTNQGAFYKYLSKLLTKQEGSEYFLEKIKNEDFLRKQRTFDNGSIPHQVHLTELKAIIRRQSEYYPFLKENLDRIEKILTFRIPYYVGPLAREKSDFAWMTRKTDDSIRPWNFEELVDKEASAEAFIHRMTNNDLYLPEEKVLPKHSLIYEKFTVYNELTKVRYKNEQGETYFFDSNIKQEIFDGVFKEHRKVSKKKLLDFLAKEYEEFRIVDVIGLDKENKAFNASLGTYHDLKKILDKDFLDNPDNESILEDIVQTLTLFEDREMIKKRLENYKDLFTESQLKKLYRRHYTGWGRLSAKLINGIRDKESQKTILDYLISDGRANRNFMQLIHDDGLSFKPIIDKAQAGSHSDNLKEVVGELAGSPAIKKGILQSLKIVDELVKVMGYEPEQVVVEMARENQTTNQGRRNTRQRYKLLEEGVKNLASDLNGNILKEYPTDNQALQNERLFLYYLQNGRDMYTGEALDIDNLSQYDIDHIVPQAFIKDDSIDNRVLVSSAKNRGKSDNVPSIDIVKARKAFWKKLLDAKLMSQRKYDNLTKAERGGLTSDDKARFIQRQLVETRQITKHVARILDERFNNELDSKGRRIRKVKIVTLKSNLVSNFRKEFGFYKIREVNDYHHAHDAYLNAVVAKAILTKYPQLEPEFVYGDYPKYNSYKTRKSATEKLFFYSNIMNFFKTKVTLADGTVVVKDDIEVNNDTGEIVWDKKKHFATVRKVLSYPQVNIVKKTEIQTGGFSKESILAHGNSDKLIPRKTKDIYLDPKKYGGFDSPIVAYSVLVVADIKKGKAQKLKTVTELLGITIMERFRFEKNPSAFLESKGYLNIRDDKLMILPKYSLFELENGRRRLLASAGELQKGNELALPTQYMKFLYLASRYNELKGKPEEIEQKQEFVVQHVSYFDDILQIINDFSNRVILADANLEKINKLYQDNKENISVDELANNIINLFTFTSLGAPAAFKFFDKIVDRKRYTSTKEVLNSTLIHQSITGLYETRIDLGKLGED

SEQ ID NO: 1180 - protein, 1370 aa, Streptococcus agalactiae
  misc_feature (9)..(9): Xaa can be any naturally occurring amino acid
MNKPYSIGXDIGTNSVGWSIITDDYKVPAKKMRVLGNTDKEYIKKNLIGALLFDGGNTAADRRLKRTARRRYTRRRNRILYLQEIFAEEMSKVDDSFFHRLEDSFLVEEDKRGSKYPIFATLQEEKDYHEKFSTIYHLRKELADKKEKADLRLIYIALAHIIKFRGHFLIEDDSFDVRNTDISKQYQDFLEIFNTTFENNDLLSQNVDVEAILTDKISKSAKKDRILAQYPNQKSTGIFAEFLKLIVGNQADFKKYFNLEDKTPLQFAKDSYDEDLENLLGQIGDEFADLFSAAKKLYDSVLLSGILTVIDLSTKAPLSASMIQRYDEHREDLKQLKQFVKASLPEKYQEIFADSSKDGYAGYIEGKTNQEAFYKYLSKLLTKQEDSENFLEKIKNEDFLRKQRTFDNGSIPHQVHLTELKAIIRRQSEYYPFLKENQDRIEKILTFRIPYYIGPLAREKSDFAWMTRKTDDSIRPWNFEDLVDKEKSAEAFIHRMTNNDFYLPEEKVLPKHSLIYEKFTVYNELTKVRYKNEQGETYFFDSNIKQEIFDGVFKEHRKVSKKKLLDFLAKEYEEFRIVDVIGLDKENKAFNASLGTYHDLEKILDKDFLDNPDNESILEDIVQTLTLFEDREMIKKRLENYKDLFTESQLKKLYRRHYTGWGRLSAKLINGIRDKESQKTILDYLIDDGRSNRNFMQLINDDGLSFKSIISKAQAGSHSDNLKEVVGELAGSPAIKKGILQSLKIVDELVKVMGYEPEQIVVEMARENQTTNQGRRNSRQRYKLLDDGVKNLASDLNGNILKEYPTDNQALQNERLFLYYLQNGRDMYTGEALDIDNLSQYDIDHIIPQAFIKDDSIDNRVLVSSAKNRGKSDDVPSLEIVKDCKVFWKKLLDAKLMSQRKYDNLTKAERGGLTSDDKARFIQRQLVETRQITKHVARILDERFNNELDSKGRRIRKVKIVTLKSNLVSNFRKEFGFYKIREVNNYHHAHDAYLNAVVAKAILTKYPQLEPEFVYGDYPKYNSYKTRKSATEKLFFYSNIMNFFKTKVTLADGTVVVKDDIEVNNDTGEIVWDKKKHFATVRKVLSYPQNNIVKKTEIQTGGFSKESILAHGNSDKLIPRKTKDIYLDPKKYGGFDSPIVAYSVLVVADIKKGKAQKLKTVTELLGITIMERSRFEKNPSAFLESKGYLNIRADKLIILPKYSLFELENGRRRLLASAGELQKGNELALPTQFMKFLYLASRYNESKGKPEEIEKKQEFVNQHVSYFDDILQLINDFSKRVILADANLEKINKLYQDNKENISVDELANNIINLFTFTSLGAPAAFKFFDKIVDRKRYTSTKEVLNSTLIHQSITGLYETRIDLGKLGED

SEQ ID NO: 1181 - protein, 1125 aa, Streptococcus anginosus
MNGLVLGLDIGIASVGVGILNKETGEIIHANSRIFPAATADSNVERRGFRQGRRLGRRKKHRSARLNNLFEEFGFITDFSAIPLNLNPYALRVKGLSEELTNEELFIALKNIIKRRGISYLDDASEDGETASNEYGKAVEENRKLLADKTPGQIQLERFEKYGQVRGDFTVVENGENHRLINVFSTSAYKKEAERILRRQQEFNVRISDEFIEAYLTILTGKRKYYHGPGNEKSRTDYGRFRTDGTTLDNIFGILIGKCTFYPDEYRAAKASYTAQEFNLLNDLNNLTVPTETKKLSPEQKRQIVEYARTAKTLGTPTLLKYIAKLVDGSIDDIKGYRIDKSDKPEMHTFDAYRKMRTLDLVNIDALSRETLDDLAHILTLNTESEGILEALNSKMPSTFTKEQIDELIQFRKKNSAVFGKGWHNFSLKLMNELISELYETSEEQMTILTRLGKQRSREISKRTKYIDEKELTEEIYNPVVAKSVRQAIKIINEATKRYGIFDNIVIEMARENNEEDAKKDYIKRQKANQDEKNASMEKAAFQYNGKKELPDSIFHGHKELATKIRLWHQQGERCLYTGKNISIRDLIHNPHQYEIDHILPLSLSFDDGLANKVLVLATANQEKGQRTPFQAIDSMDDAWSYREFKQYVRNSKSLSNKKKDYLLTEEDISKIEVKQKFIERNLVDTRYSSRVVLNTLQEFYKTNDFDTKISVVRGQFTSQLRRKWKIEKSRDTYHHHAVDALIIAASSQLRLWKKQNNPLISYKEGQFVDPETGEILSLTDDEYKELVFRPPYDYFVDTLKSKSFEDSILFSYQVDSKYNRKISDATIYGTRKAQLGKDKQEETYVLGKIKDIYSQKGYEDFIKRYNKDETQFLIYHKDPQTFEKVIEEILKTYPDKELNEKGKEIPCNPFEKYRQENGPIRKYSKKGKGPEIKSLKYYDNKLGNHIDITPVNSQNQVVLQSLKPWRTDVYFNPRTSKYELMGLKYSDLRFEKGSGSYGISPEKYNKVKAKEGVNEDSEFKFTLYKNDLILIKDTETGEQQLFRYGSRNDTSKHYVELKPYEKAKFEGNQQLMNLLGTVAKGGQCLKGINKPNLSIYKVKTDVLGNKYFIKKEGDQPQLNFKKKF

SEQ ID NO: 1182 - protein, 1386 aa, Streptococcus anginosus
MNQKYSIGLDIGTNSVGWAVITDDYKVPAKKMKVLGNTDKQSIKKNLLGALLFDSGETAEATRLKRTARRRYTRRRNRLRYLQEIFAEEMMQVDESFFQRLDDSFLVDEDKRGERHPIFGNIAAEVKYHDEFPTIYHLRKHLADISQKADLRLVYLALAHMIKFRGHFLIEGQLKAENTNVQALFKDFVEVYDKTVEESHLSEITVDALSILTEKVSKSRRLENLIAHYPAEKKNTLFGNLIALFLGLQPNFKTNFQLSEDAKLQFSKDTYEEDLEGLLGEVGDEYADLFASAKNLYDAILLSGILTVDDNSTKAPLSASMVKRYEEHQKDLKKFEDFIKVNALDQYNAIFKDKNKKGYAGYIESGVKQDEFYKYLKGILLQINGSGDFLDKIDREDFLRKQRTFDNGSIPHQIHLQEMHAILRRQGEHYPFLKENQDKIEKILTFRIPYYVGPLARKGSRFAWAEYKADEKITPWNFDDILDKEKSAEKFITRMTLNDLYLPEEKVLPKHSLLYETFTVYNELTKVKYVNEQGEAKFFDANMKQEIFDHVFKENRKVTKDKLLNYLNKEFEEFRIVNLTGLDKENKVFNSSLGTYHDLRKILNKSFLDNKENAQIIEDIIQTLTLFEDREMIRQRLQKYSDIFTKAQLKKLERRHYTGWGRLSYKLINGIRNKENKKTILDYLIDDGYANRNFMQLINDDALSFKEEIAKAQIIGDVDDIANVVHDLPGSPAIKKGILQSVKIVDELVKVMGHNPANIIIEMARENQTTDRGRRNSQQRLKLLQDSLKNLDNPVNIKNVENQQLQNDRLFLYYIQNGKDMYTGETLDINNLSQYDIDHIIPQAYIKDDSFDNRVLTSSSENRGKSDNVPSIEVVCARKADWMRLRKAGLISQRKFDNLTKAERGGLTENDKAGFIKRQLVETRQITKHVAQVLDARFNAKHDENKKVIRDVKIITLKSNLVSQFRKDFKFYKVREINDYHHAHDAYLNAVIGTALLKKYPKLASEFVYGEFKKYDVRKFIAKSDKEIGKATAKYFFYSNLMNFFKKEVKFADGTVVERPDIETSEDGEIAWNKQTDFKIVRKVLSYPQVNIVKKTEVQTHGLDRGKPRGLFNANPSPKPKPDSSENLVGVKRNLDPKKYGGYAGISNSYAVLVKAIIEKGVKKKETMVLEFQGISILDRITFEKDKRAFLLGKGYKDIKKIIELPKYSLFELKDGSRRMLASILSTNNKRGEIHKGNELFVPQKFTTLLYHAKRINNPINKDHIEYVKKHRDDFKELLNYVLEFNEKYVGATKNGERLKEAVADFDSKSNEEICTSFLGAVNSKNAGLFELTSLGSASDFEFLGVKIPRYRDYTPSSLLKDSTLIHQSITGLYETRIDLSKLGED

SEQ ID NO: 1183 - protein, 1396 aa, Streptococcus anginosus
MTKPYSIGLDIGTNSVGWAVITDDYKVPAKKMKVLGNTNRDYIKKNLLGALLFDGGETAEGRRLKRTARRRYTRRKNRLRYLQEIFAEEMMQVDESFFQRLDDSFLVEEDKQGSKYPIFGTLKEEKEYHKKFKTIYHLREELANSKEKADLRLVYLALAHMIKFRGHFLYEGDLKAENTDVQALFKDFVEEYDKTIEESHLSEITVDALSILTEKVSKSSRLENLIAHYPTEKKNTLFGNLIALSLGLQANFKTNFQLSEDAKLQFSKDTYEEDLEGLLGEVGDEYADLFVSAKNLYDAILLSGILTVDDNSTKAPLSASMVKRYKEHKEELAAFKRFIKEKLPKKYEEIFKDDTKNGYAGYVGADKKLRKRSGKLATEEEFYKYVKGILNKVEGADYFLDKIDREDFLRKQRTFDNGSIPHQIHLQEMHAILRRQGEHYPFLKENQDKIEKILTFRIPYYVGPLARKGSRFAWAEYKADEKITPWNFDDILDKEKSAEKFITRMTLNDLYLPEEKVLPKHSPLYETFTVYNELTKVKYVNEQGEAKFFDTNMKQEIFDHVFKENRKVTKDKLLNYLNKEFEEFRIVNLTGLDKENKAFNASLGTYHDLRKILDKSFLDDKVNEKIIEDIIQTLTLFEDREMIRQRLQKYSDIFTTQQLKELERRHYTGWGRLSYKLINGIRNKENKKTILDYLIDDGYANRNFMQLINDDALSFKEEIARAQIIGDVDDIANVVHDLPGSPAIKKGILQSVKIVDELVKVMGHNPTNIIIEMARENQTTDKGRRNSQQRLKLLQDSLKNLDNPVNIKNVENQQLQNDRLFLYYIQNGKDMYTGETLDINNLSQYDIDHIIPQAFIKDNSLDNRVLTRSDKNRGKSDDVPSIEVVHEMKSFWSKLLSVKLITQRKFDNLTKAERGGLTENDKAGFIKRQLVETRQITKHVAQVLDARFNAKHDENKKVIRDVKIITLKSNLVSQFRKDFKFYKVREINDYHHAHDAYLNAVIGTALLKKYPKLASEFVYGEFKKYDVRKFIAKSDKEIGKATAKYFFYSNLMNFFKKEVKFADGTVVERPDIETSEDGEIAWNKQTDFKIVRKVLSYPQVNIVKKTEVQTHGLDRGKPRGLFNANPSPKPKPDSSENLVGIKRNLDPKKYGGYAGISNSYAVLVKAIIEKGVKKKETMVLEFQGISILDRITFEKDKRAFLLGKGYKDIKKIIELPKYSLFELKDGSRRMLASILSTNNKRGEIHKGNELFVPQKFTTLLYHAKRINNPINKDHIEYVKKHRDDFKELLNYVLEFNEKYVGATKNGERLKEAVADFDSKSNEEICTSFLGAVNSKNAGLFELTSLGSASDFEFLGVKIPRYRDYTPSSLLKDSILIHQSITGLYETRIDLSKLGED

SEQ ID NO: 1184 - protein, 1375 aa, Streptococcus canis
MEKKYSIGLDIGTNSVGWAVITDDYKVPSKKFKVLGNTNRKSIKKNLMGALLFDSGETAEATRLKRTARRRYTRRKNRIRYLQEIFANEMAKLDDSFFQRLEESFLVEEDKKNERHPIFGNLADEVAYHRNYPTIYHLRKKLADSPEKADLRLIYLALAHIIKFRGHFLIEGKLNAENSDVAKLFYQLIQTYNQLFEESPLDEIEVDAKGILSARLSKSKRLEKLIAVFPNEKKNGLFGNIIALALGLTPNFKSNFDLTEDAKLQLSKDTYDDDLDELLGQIGDQYADLFSAAKNLSDAILLSDILRSNSEVTKAPLSASMVKRYDEHHQDLALLKTLVRQQFPEKYAEIFKDDTKNGYAGYVGIGIKHRKRTTKLATQEEFYKFIKPILEKMDGAEELLAKLNRDDLLRKQRTFDNGSIPHQIHLKELHAILRRQEEFYPFLKENREKIEKILTFRIPYYVGPLARGNSRFAWLTRKSEEAITPWNFEEVVDKGASAQSFIERMTNFDEQLPNKKVLPKHSLLYEYFTVYNELTKVKYVTERMRKPEFLSGEQKKAIVDLLFKTNRKVTVKQLKEDYFKKIECFDSVEIIGVEDRFNASLGTYHDLLKIIKDKDFLDNEENEDILEDIVLTLTLFEDREMIEERLKTYAHLFDDKVMKQLKRRHYTGWGRLSRKMINGIRDKQSGKTILDFLKSDGFSNRNFMQLIHDDSLTFKEEIEKAQVSGQGDSLHEQIADLAGSPAIKKGILQTVKIVDELVKVMGHKPENIVIEMARENQTTTKGLQQSRERKKRIEEGIKELESQILKENPVENTQLQNEKLYLYYLQNGRDMYVDQELDINRLSDYDVDHIVPQSFIKDDSIDNKVLTRSVENRGKSDNVPSEEVVKKMKNYWRQLLNAKLITQRKFDNLTKAERGGLSEADKAGFIKRQLVETRQITKHVARILDSRMNTKRDKNDKPIREVKVITLKSKLVSDFRKDFQLYKVRDINNYHHAHDAYLNAVVGTALIKKYPKLESEFVYGDYKVYDVRKMIAKSEQEIGKATAKRFFYSNIMNFFKTEVKLANGEIRKRPLIETNGETGEVVWNKEKDFATVRKVLAMPQVNIVKKTEVQTGGFSKESILSKRESAKLIPRKKGWDTRKYGGFGSPTVAYSILVVAKVEKGKAKKLKSVKVLVGITIMEKGSYEKDPIGFLEAKGYKDIKKELIFKLPKYSLFELENGRRRMLASATELQKANELVLPQHLVRLLYYTQNISATTGSNNLGYIEQHREEFKEIFEKIIDFSEKYILKNKVNSNLKSSFDEQFAVSDSILLSNSFVSLLKYTSFGASGGFTFLDLDVKQGRLRYQTVTEVLDATLIYQSITGLYETRTDLSQLGGD

SEQ ID NO: 1185 - protein, 1345 aa, Streptococcus constellatus
MGKPYSIGLDIGTNSVGWAVVTDDYKVPAKKMKVLGNTDKQSIKKNLLGALLFDSGETAEATRLKRTARRRYTRRKNRLRYLQEIFTGEMNKVDENFFQRLDDSFLVDEDKRGEHHPIFGNIAAEVKYHDDFPTIYHLRRHLADTSKKADLRLVYLALAHMIKFRGHFLYEGDLKAENTDVQALFKDFVEEYDKTIEESHLSEITVDALSILTEKVSKSSRLENLIAHYPTEKKNTLFGNLIALSLDLHPNFKTNFQLSEDAKLQFSKDTYEEDLEGFLGEVGDEYADLFASAKNLYDAILLSGILTVDDNSTKAPLSASMVKRYEEHQKDLKKLKDFIKVNAPDQYNAIFKDKNKKGYASYIESGVKQDEFYKYLKGILLKINGSGDFLDKIDREDFLRKQRTFDNGSIPHQIHLQEMHAILRRQGEHYPFLKENQDKIEKILTFRIPYYVGPLARKGSRFAWAEYKADEKITPWNFDDILDKEKSAEKFITRMTLNDLYLPEEKVLPKHSPLYEAFTVYNELTKVKYVNEQGEAKFFDTNMKQEIFDHVFKENRKVTKDKLLNYLNKEFEEFRIVNLTGLDKENKAFNSSLGTYHDLRKILDKSFLDDKANEKTIEDIIQTLTLFEDREMIRQRLQKYSDIFTKAQLKKLERRHYTGWGRLSYKLINGIRNKENKKTILDYLIDDGYANRNFMQLINDDALSFKEEIARAQIIDDVDDIANVVHDLPGSPAIKKGILQSVKIVDELVKVMGHNPANIIIEMARENQTTDKGRRNSQQRLKLLQDSLKNLDNPVNIKNVENQQLQNDRLFLYYIQNGKDMYTGETLDINNLSQYDIDHIIPQAFIKDNSLDNRVLTRSDKNRGKSDDVPSIEVVHEMKSFWSKLLSVKLITQRKFDNLTKAERGGLTEEDKAGFIKRQLVETRQITKHVAQILDERFNTEFDGNKRRIRNVKIITLKSNLVSNFRKEFELYKVREINDYHHAHDAYLNAVVGNALLLKYPQLEPEFVYGEYPKYNSYRSRKSATEKFLFYSNILRFFKKEDIQTNEDGEIAWNKEKHIKILRKVLSYPQVNIVKKTEEQTGGFSKESILPKGESDKLIPRKTKNSYWDPKKYGGFDSPVVAYSILVFADVEKGKSKKLRKVQDMVGITIMEKKRFEKNPVDFLEQRGYRNVRLEKIIKLPKYSLFELENKRRRLLASAKELQKGNELVIPQRFTTLLYHSYRIEKDYEPEHREYVEKHKDEFKELLEYISVFSRKYVLADNNLTKIEMLFSKNKDAEVSSLAKSFISLLTFTAFGAPAAFNFFGENIDRKRYTSVTECLNATLIHQSITGLYETRIDLSKLGED

SEQ ID NO: 1186 - protein, 538 aa, Streptococcus dysgalactiae
DYDVDHIVPQSFIKDDSIDNKVLTRSDKNRGKSDNVPSEEVVKKMKNYWRQLLNAKLITQRKFDNLTKAERGGLSELDKAGFIKRQLVETRQITKHVAQILDSRMNTKYDENDKLIREVKVITLKSKLVSDFRKDFQFYKVREINNYHHAHDAYLNAVVGTALIKKYPKLESEFVYGDYKVYDVRKMIAKSEQEIGKATAKRFFYSNIMNFFKTEITLANGEIRKRPLIETNEETGEIVWDKGRDFATVRKVLSMPQVNIVKKTEVQTGALTNESIYARGSFDKLISRKHRFESSKYGGFGSPTVTYSVLVVAKSKVQDGKVKKIKTGKELIGITLLDKLVFEKNPLKFIEDKGYGNVQIDKCIRLPKYSLFEFENGTRRMLASVMANNNSRGDLQKANEMFLPAKLVTLLYHAHKIESSKELEHEAYILDHYNDLYQLLSYIERFASLYVDVEKNISKVKELFSNIESYSISEICSSVINLLTLTASGAPADFKFLGTTIPRKRYGSPQSILSSTLIHQSITGLYETRIDLSQLGGD

SEQ ID NO: 1187 - protein, 1155 aa, Streptococcus dysgalactiae
MDKKYSIGLDIGTNSVGWAVITDDYKVPSKKFKVLGNTDRHSIKKNLIGALLFDSGETAEATRLKRSARRRYTRRKNRIRYLQEIFSSEMSKVDDSFFHRLEESFLVEEDKKHERHPIFGNIVDEVAYHEKYPTIYHLRKKLADSTDKADLRLIYLALAHMIKFRGHFLIEGDLNPDNSDMDKLFIQLVQTYNQLFEENPINASRVDAKAILSARLSKSRRLENLIAQLPGEKRNGLFGNLIALSLGLTPNFKSNFDLAEDAKLQLSKDTYDDDLDNLLAQIGDQYADLFLAAKNLSDAILLSDILRVNSEITKAPLSASMIKRYDEHHQDLTLLKALVRQQLPEKYKEIFFDQSKNGYAGYIDGGASQEEFYKFIKPILEKMDGTEELLAKLNREDLLRKQRTFDNGSIPHQIHLGELHAILRRQEDFYPFLKDNREKIEKILTFRIPYYVGPLARGNSRFAWMTRKSEETITPWNFEEVVDKGASAQSFIERMTNFDKNLPNEKVLPKHSLLYEYFTVYNELTKVKYVTEGMRKPEFLSGKQKEAIVDLLFKTNRKVTVKQLKEDYFKKIECFDSVEISGVEDRFNASLGTYHDLLKIIKDKDFLDNEENEDILEDIVLTLTLFEDKEMIEERLKTYAHLFDDKVMKQLKRRHYTGWGRLSRKLINGIRDKQSGKTILDFLKSDGFANRNFIQLIHDDSLTFKEAIQKAQVSGQGHSLHEQIANLAGSPAIKKGILQSVKVVDELVKVMGHKPENIVIEMARENQTTQKGQKNSRERMKRIEEGIKELGSQILKEHPVENTQLQNEKLYLYYLQNRRDMYVDQELDINRLSDYDVDHIVPQSFIKDDSIDNKVLTRSDKNRGKSDDVPSEEVVKKMKNYWRQLLNAKLITQRKFDNLTKAERGGLSELDKAGFIKRQLVETRQITKHVAQILDSRMNTKYDENDKLIREVKVITLKSKLVSDFRKDFQFYKVREINNYHHAHDAYLNAVVGTALIKKYPKLESEFVYGDYKVYDVRKMIAKSEQEIGKATAKRFFYSNIMNFFKTEITLANGEIRKRPLIETNEETGEIVWDKGRDFATVRKVLSMPQVNIVKKTEVQTGALTNESIYARGSFDKLISRKHRFESSKYGGFGSPTVTYSVLVVAKYQSYKMEK

SEQ ID NO: 1188 - protein, 1371 aa, Streptococcus dysgalactiae
MDKKYSIGLDIGTNSVGWAVITDDYKVPSKKFKVLGNTDRHSIKKNLIGALLFDSGETAEATRLKRTARRRYTRRKNRIRYLQEIFSSEMSKVDDSFFHRLEESFLVEEDKKHERHPIFGNIVDEVAYHEKYPTIYHLRKKLADSTDKADLRLIYLALAHMIKFRGHFLIEGDLNPDNSDMDKLFIQLVQTYNQLFEENPINASRVDAKAILSARLSKSRRLENLIAQLPGEKRNGLFGNLIALSLGLTPNFKSNFDLAEDAKLQLSKDTYDDDLDNLLAQIGDQYADLFLAAKNLSDAILLSDILRVNSEITKAPLSASMIKRYDEHHQDLTLLKALVRQQLPEKYKEIFFDQSKNGYAGYIDGGASQEEFYKFIKPILEKMDGTEELLAKLNREDLLRKQRTFDNGSIPHQIHLGELHAILRRQEDFYPFLKDNREKIEKILTFRIPYYVGPLARGNSRFAWMTRKSEETITPWNFEEVVDKGASAQSFIERMTNFDKNLPNEKVLPKHSLLYEYFTVYNELTKVKYVTEGMRKPEFLSGKQKEAIVDLLFKTNRKVTVKQLKEDYFKKIECFDSVEISGVEDRFNASLGTYHDLLKIIKDKDFLDNEENEDILEDIVLTLTLFEDKEMIEERLKTYAHLFDDKVMKQLKRRHYTGWGRLSRKLINGIRDKQSGKTILDFLKSDGFANRNFIQLIHDDSLTFKEAIQKAQVSGQGHSLHEQIANLAGSPAIKKGILQSVKVVDELVKVMGHKPENIVIEMARENQTTQKGQKNSRERMKRIEEGIKELGSQILKEHPVENTQLQNEKLYLYYLQNGRDMYVDQELDINRLSDYDVDHIVPQSFIKDDSIDNKVLTRSDKNRGKSDDVPSEEVVKKMKNYWRQLLNAKLITQRKFDNLTKAERGGLSELDKAGFIKRQLVETRQITKHVAQILDSRMNTKYDENDKLIREVKVITLKSKLVSDFRKDFQFYKVREINNYHHAHDAYLNAVVGTALIKKYPKLESEFVYGDYKVYDVRKMIAKSEQEIGKATAKRFFYSNIMNFFKTEITLANGEIRKRPLIETNEETGEIVWNKGRDFATVRKVLSMPQVNIVKKTEVQTGALTNESIYARGSFDKLISRKHRFESSKYGGFGSPTVTYSVLVVAKSKVQDGKVKKIKTGKELIGITLLDKLVFEKNPLKFIEDKGYGNVQIDKCIKLPKYSLFEFENGTRRMLASVMANNNSRGDLQKANEMFLPAKLVTLLYHAHKIESSKELEHEAYILDHYNDLYQLLSYIERFASLYVDVEKNISKVKELFSNIESYSISEICSSVINLLTLTASGAPADFKFLGTTIPRKRYGSPQSILSSTLIHQSITGLYETRIDLSQLGGD

SEQ ID NO: 1189 - protein, 1371 aa, Streptococcus dysgalactiae
MDKKYSIGLDIGTNSVGWAVITDDYKVPSKKFKVLGNTDRHSIKKNLIGALLFDSGETAEATRLKRTARRRYTRRKNRIRYLQEIFSSEMSKVDDSFFHRLEESFLVEEDKKHERHPIFGNIVDEVAYHEKYPTIYHLRKKLADSTDKADLRLIYLALAHMIKFRGHFLIEGDLNPDNSDMDKLFIQLVQTYNQLFEENPINASRVDAKAILSARLSKSRRLENLIAQLPGEKRNGLFGNLIALSLGLTPNFKSNFDLAEDAKLQLSKDTYDDDLDNLLAQIGDQYADLFLAAKNLSDAILLSDILRVNSEITKAPLSASMIKRYDEHHQDLTLLKALVRQQLPEKYKEIFFDQSKNGYAGYIDGGASQEEFYKFIKPILEKMDGTEELLAKLNREDLLRKQRTFDNGSIPHQIHLGELHAILRRQEDFYPFLKDNREKIEKILTFRIPYYVGPLARGNSRFAWMTRKSEETITPWNFEEVVDKGASAQSFIERMTNFDKNLPNEKVLPKHSLLYEYFTVYNELTKVKYVTEGMRKPEFLSGKQKEAIVDLLFKTNRKVTVKQLKEDYFKKIECFDSVEISGVEDRFNASLGTYHDLLKIIKDKDFLDNEENEDILEDIVLTLTLFEDKEMIEERLKKYANLFDDKVMKQLKRRHYTGWGRLSRKLINGIRDKQSGKTILDFLKSDGFANRNFMQLINDDSLTFKEAIQKAQVSGQGHSLHEQIANLAGSPAIKKGILQSVKVVDELVKVMGHKPENIVIEMARENQTTQKGQKNSRERMKRIEEGIKELGSQILKEHPVENTQLQNEKLYLYYLQNGRDMYVDQELDINRLSDYDVDHIVPQSFIKDDSIDNKVLTRSDKNRGKSDNVPSEEVVKKMKNYWRQLLNAKLITQRKFDNLTKAERGGLSELDKAGFIKRQLVETRQITKHVAQILDSRMNTKYDENDKLIREVKVITLKSKLVSDFRKDFQFYKVREINNYHHAHDAYLNAVVGTALIKKYPKLESEFVYGDYKVYDVRKMIAKSEQEIGKATAKRFFYSNIMNFFKTEITLANGEIRKRPLIETNEETGEIVWDKGRDFATVRKVLSMPQVNIVKKTEVQTGALTNESIYARGSFDKLISRKHRFESSKYGGFGSPTVTYSVLVVAKSKVQDGKVKKIKTGKELIGITLLDKLVFEKNPLKFIEDKGYGNVQIDKCIKLPKYSLFEFENGTRRMLASVMANNNSRGDLQKANEMFLPAKLVTLLYHAHKIESSKELEHEAYILDHYNDLYQLLSYIERFASLYVDVEKNISKVKELFSNIESYSISEICSSVINLLTLTASGAPADFKFLGTTIPRKRYGSPQSILSSTLIHQSITGLYETRIDLSQLGGD

SEQ ID NO: 1190 - protein, 1371 aa, Streptococcus dysgalactiae
MDKKYSIGLDIGTNSVGWAVITDDYKVPSKKFKVLGNTDRHSIKKNLIGALLFDSGETAEATRLKRTARRRYTRRKNRIRYLQEIFSSEMSKVDDSFFHRLEESFLVEEDKKHERHPIFGNIVDEVAYHEKYPTIYHLRKKLADSTDKADLRLIYLALAHMIKFRGHFLIEGDLNPDNSDVDKLFIQLVQTYNQLFEEKPINASGVDAKAILSARLSKSKRLENLIAQLPGEKKNGLFGNLIALSLGLTPNFKSNFDLAEDAKLQLSKDTYDDDLDNLLAQIGNQYADLFLAAKNLSDAILLSDILRVNSEITKAPLSASMIKRYDEHHQDLTLLKALVRQQLPEKYKEIFFDQSKNGYAGYIDGGASQEEFYKFIKPILEKMDGTEELLAKLNREDLLRKQRTFDNGSIPHQIHLGELHAILRRQEDFYPFLKDNREKIEKILTFRIPYYVGPLARGNSRFAWMTRKSEETITPWNFEEVVDKGASAQSFIERMTNFDKNLPNEKVLPKHSLLYEYFTVYNELTKVKYVTEGMRKPEFLSGKQKEAIVDLLFKTNRKVTVKQLKEDYFKKIECFDSVEISGVEDRFNASLGTYHDLLKIIKDKDFLDNEENEDILEDIVLTLTLFEDKEMIEERLKKYANLFDDKVMKQLKRRHYTGWGRLSRKLINGIRDKQSGKTILDFLKSDGFANRNFMQLINDDSLTFKEAIQKAQVSGQGHSLHEQIANLAGSPAIKKGILQSVKVVDELVKVMGHKPENIVIEMARENQTTQKGQKNSRERMKRIEEGIKELGSQILKEHPVENTQLQNEKLYLYYLQNGRDMYVDQELDINRLSDYDVDHIVPQSFIKDDSIDNKVLTRSDKNRGKSDNVPSEEVVKKMKNYWRQLLNAKLITQRKFDNLTKAERGGLSELDKAGFIKRQLVETRQITKHVAQILDSRMNTKYDENDKLIREVKVITLKSKLVSDFRKDFQFYKVREINNYHHAHDAYLNAVVGTALIKKYPKLESEFVYGDYKVYDVRKMIAKSEQEIGKATAKRFFYSNIMNFFKTEITLANGEIRKRPLIETNEETGEIVWDKGRDFATVRKVLSMPQVNIVKKTEVQTGALTNESIYARGSFDKLISRKHRFESSKYGGFGSPTVTYSVLVVAKSKVQDGKVKKIKTGKELIGITLLDKLVFEKNPLKFIEDKGYGNVQIDKCIKLPKYSLFEFENGTRRMLASVMANNNSRGDLQKANEMFLPAKLVTLLYHAHKIESSKELEHEAYILDHYNDLYQLLSYIERFASLYVDVEKNISKVKELFSNIESYSISEICSSVINLLTLTASGAPADFKFLGTTIPRKRYGSPQSILSSTLIHQSITGLYETRIDLSQLGGD

SEQ ID NO: 1191 - protein, 1370 aa, Streptococcus gallolyticus; identical to SEQ ID NO: 204

SEQ ID NO: 1192 - protein, 1375 aa, Streptococcus infantarius
MEKSYSIGLDIGTNSVGWAVITDDYKVPAKKMKVLGNTDKKYIKKNLLGALLFDSGETAEVTRLKRTARRRYTRRKNRLRYLQEIFAKEMTKVDESFFQRLEESFLTDDDKTFDSHPIFGNKAEEDAYHQKFPTIYHLRKYLADSQEKADLRLVYLALAHMIKYRGHFLIEGELNAENTDVQKLFNVFVETYDKIVDESHLSEIEVDASSILTEKVSKSRRLENLIKQYPTEKKNTLFGNLIALALGLQPNFKTNFKLSEDAKLQFSKDTYEEDLEELLGKVGDDYADLFISAKNLYDAILLSGILTVDDNSTKAPLSASMIKRYVEHHEDLEKLKEFIKINKLKLYHDIFKDKTKNGYAGYIDNGVKQDEFYKYLKTILTKIDDSDYFLDKIERDDFLRKQRTFDNGSIPHQIHLQEMHSILRRQGDYYPFLKENQAKIEKILTFRIPYYVGPLARKDSRFAWANYHSDEPITPWNFDEVVDKEKSAEKFITRMTLNDLYLPEEKVLPKHSHVYETFTVYNELTKIKYVNEQGESFFFDANMKQEIFDHVFKENRKVTKAKLLSYLNNEFEEFRINDLIGLDKDSKSFNASLGTYHDLKKILDKSFLDDKTNGQIIEDIVLTLTLFEDRDMIHERLQKYSDFFTSQQLKKLERRHYTGWGRLSYKLINGIRNKENNKTILDFLIDDGHANRNFMQLINDESLSFKTIIQEAQVVGDVDDIEAVVHDLPGSPAIKKGILQSVKIVDELVKVMGDNPDNIVIEMARENQTTGYGRNKSNQRLKRLQDSLKEFGSDILSKKKPSYVDSKVENSHLQNDRLFLYYIQNGKDMYTGEELDIDRLSDYDIDHIIPQAFIKDNSIDNKVLTSSAKNRGKSDDVPSIEIVRNRRSYWYKLYKSGLISKRKFDNLTKAERGGLTEADKAGFIKRQLVETRQITKHVAQILDARFNTKRDENDKVIRDVKVITLKSNLVSQFRKEFKFYKVREINDYHHAHDAYLNAVVGTALLKKYPKLTPEFVYGEYKKYDVRKLIAKSSDDYSEMGKATAKYFFYSNLMNFFKTEVKYADGRVFERPDIETNADGEVVWNKQKDFDIVRKVLSYPQVNIVKKVEAQTGGFSKESILSKGDSDKLIPRKTKKVYWNTKKYGGFDSPTVAYSVLVVADIEKGKAKKLKTVKELVGISIMERSFFEENPVSFLEKKGYHNVQEDKLIKLPKYSLFEFEGGRRRLLASATELQKGNEVMLPAHLVELLYHAHRIDSFNSTEHLKYVSEHKKEFEKVLSCVENFSNLYVDVEKNLSKVRAAAESMTNFSLEEISASFINLLTLTALGAPADFNFLGEKIPRKRYTSTKECLSATLIHQSVTGLYETRIDLSKLGEE

SEQ ID NO: 1193 - protein, 1368 aa, Streptococcus iniae
MRKPYSIGLDIGTNSVGWAVITDDYKVPSKKMRIQGTTDRTSIKKNLIGALLFDNGETAEATRLKRTTRRRYTRRKYRIKELQKIFSSEMNELDIAFFPRLSESFLVSDDKEFENHPIFGNLKDEITYHNDYPTIYHLRQTLADSDQKADLRLIYLALAHIIKFRGHFLIEGNLDSENTDVHVLFLNLVNIYNNLFEEDIVETASIDAEKILTSKTSKSRRLENLIAEIPNQKRNMLFGNLVSLALGLTPNFKTNFELLEDAKLQISKDSYEEDLDNLLAQIGDQYADLFIAAKKLSDAILLSDIITVKGASTKAPLSASMVQRYEEHQQDLALLKNLVKKQIPEKYKEIFDNKEKNGYAGYIDGKTSQEEFYKYIKPILLKLDGTEKLISKLEREDFLRKQRTFDNGSIPHQIHLNELKAIIRRQEKFYPFLKENQKKIEKLFTFKIPYYVGPLANGQSSFAWLKRQSNESITPWNFEEVVDQEASARAFIERMTNFDTYLPEEKVLPKHSPLYEMFMVYNELTKVKYQTEGMKRPVFLSSEDKEEIVNLLFKKERKVTVKQLKEEYFSKMKCFHTVTILGVEDRFNASLGTYHDLLKIFKDKAFLDDEANQDILEEIVWTLTLFEDQAMIERRLVKYADVFEKSVLKKLKKRHYTGWGRLSQKLINGIKDKQTGKTILGFLKDDGVANRNFMQLINDSSLDFAKIIKNEQEKTIKNESLEETIANLAGSPAIKKGILQSIKIVDEIVKIMGQNPDNIVIEMARENQSTMQGIKNSRQRLRKLEEVHKNTGSKILKEYNVSNTQLQSDRLYLYLLQDGKDMYTGKELDYDNLSQYDIDHIIPQSFIKDNSIDNTVLTTQASNRGKSDNVPNIETVNKMKSFWYKQLKSGAISQRKFDHLTKAERGALSDFDKAGFIKRQLVETRQITKHVAQILDSRFNSNLTEDSKSNRNVKIITLKSKMVSDFRKDFGFYKLREVNDYHHAQDAYLNAVVGTALLKKYPKLEAEFVYGDYKHYDLAKLMIQPDSSLGKATTRMFFYSNLMNFFKKEIKLADDTIFTRPQIEVNTETGEIVWDKVKDMQTIRKVMSYPQVNIVMKTEVQTGGFSKESIWPKGDSDKLIARKKSWDPKKYGGFDSPIIAYSVLVVAKIAKGKTQKLKTIKELVGIKIMEQDEFEKDPIAFLEKKGYQDIQTSSIIKLPKYSLFELENGRKRLLASAKELQKGNELALPNKYVKFLYLASHYTKFTGKEEDREKKRSYVESHLYYFDEIMQIIVEYSNRYILADSNLIKIQNLYKEKDNFSIEEQAINMLNLFTFTDLGAPSAFKFFNGDIDRKRYSSTNEIINSTLIYQSPTGLYETRIDLSKLGGK

SEQ ID NO: 1194 - protein, 1392 aa, Streptococcus mitis
MNNNNYSIGLDIGTNSVGWAVITDDYKVPSKKMKVLGNTDKHFIKKNLIGALLFDEGATAEDRRFKRTARRRYTRRKNRLRYLQEIFSEEMSKVDSSFFHRLDDSFLVPEDKRGSKYPIFATLAEEKEYHKKFPTIYHLRKHLADSKEKTDLRLIYLALAHMIKYRGHFLYEESFDIKNNDIQKIFSEFISIYDNTFEGSSLSGQNAQVEAIFTDKISKSAKRERILKLFAYEKSTDLFSEFLKLIVGNQADFKKHFDLEEKAPLQFSKDTYDEDLENLLGQIGDDFADLFLVAKKLYDAILLSGILTVTDSSTKAPLSASMIERYENHQKDLAALKQFIQNNLQEKYDEVFSDQSKDGYARYINGKTTQEAFYKYIKNLLSKFEGSDYFLDKIEREDFLRKQRTFDNGSIPHQIHLQEMNAIIRRQGEHYPFLKEYKEKIETILTFRIPYYVGPLARGNRNFAWLTRNSDQAIRPWNFEEIVDQASSAEEFINKMTNYDLYLPEEKVLPKHSLLYETFAVYNELTKVKFISEGLRDYQFLDSGQKKQIVNQLFKEKRKVTEKDIIQYLHNVDGYDGIELKGIEKQFNASLSTYHDLLKIIKDKEFMDDPKNEEILENIVHTLTIFEDREMIKQRLAQYASIFDKKVIKALTRRHYTGWGKLSAKLINGICDKKTGKTILDYLIDDGYSNRNFMQLINDDGLSFKDIIQKAQVVGKTNDVKQVVQELPGSPAIKKGILQSIKLVDELVKVMGHAPESIVIEIARENQTTARGKKNSQQRYKRIEDALKNLAPGLDSNILKEHPTDNIQLQNDRLFLYYLQNGKDMYTGEALDINQLSSYDIDHIVPQAFIKDDSLDNRVLTSSKDNRGKSDNVPSLEVVQKRKAFWQQLLDSKLISEHKFNNLTKAERGGLDERDKVGFIRRQLVETRQITKHVAQILDARFNTEVNEKDKKNRTVKIITLKSNLVSNFRKEFKLYKVREINDYHHAHDAYLNAVVAKAILKKYPKLEPGFVYGDYQKYDIKRYISRSKDPKEVEKATEKYFFYSNLLNFFKEEVHYADGTIVKRENIEYSKDTGEIAWNKEKDFATIKKVLSLPQVNIVKKTEIQTHGLDRGKPRGLFNSNPSPKPSEDRKENLVPIKQGLDPRKYGGYAGISNSYAVLVKAIIEKGAKKQQKTVLEFQGISILDKINFEKNKENYLLEKGYIKILSTITLPKYSLFEFPDGTRRRLASILSTNNKRGEIHKGNELVIPEKYTTLLYHAKNINKTLEPEHLEYVEKHRNDFAKLLEYVLNFNDKYVGALKNGERIRQAFIDWETVDIEKLCFSFIGPRNSKNAGLFELTSQGSASDFEFLGVKIPRYRDYTPSSLLNATLIHQSITGLYETRIDLSKLGED

SEQ ID NO: 1195 - protein, 1134 aa, Streptococcus mutans
MANGKILGLDIGIASVGVGIIDKETGKIIHVNSRIFPAATADSNVERRGFRQGRRLVRRKKHRKVRLADLFLDSNLLTDFSKVSLNLNPYQLRVKGLNEELSNEELFIALKSIVSRRGISYLDDASEDSGANSSEYGKAVEENRKLLEDRTPGQIQLERFEKYGKVRGDFTVVENGENHRLINVFSTSAYKKEAERILRRQQEFNMRIADEFIEAYLTILTGKRKYYHGPGNEKSRTDYGRFRTDGTTLDNIFGILIGKCTFYPDEYRAAKASYTAQEFNLLNDLNNLTVPTETKKLSEEQKRQIIEHAKTVKTLGAPTLLKYIVKLVGCSADDIKGYRIDKSDKPEIHTFEAYRKMRTMELIKVDDLSRESLDALAHILTLNTEREGIEEAIRDRFTNKEFNQEQINELVLFRKNNSSLFGKGWHNFSLKLMKELIPELYETSEEQMTILTRLGKQRVKKSSNRTNYIDEKELTEEIYNPVVAKSVRQAIKIINLATKKYGVFDNIVIEMARESNEDDEKKAIQNAQKANEDEKKAALLKAAHQFNGKEELPDSIFHGHKELLTKIRLWHQQGEKCLYTGKTIFINDLIHNPYKYEIDHILPLSLSFDDSLANKVLVLSTANQEKGQRTPFQSLDSMDGAWTYREFKSYVKGLKTLSNKKKDYLLTEENIDKIEVKQKFIERNLVDTRYSSRVVLNALQDFYKERKFDTKISVVRGQFTSQLRRKWRIEKTRETYHHHAVDALIIAASSQLNLWKKQNNPLISYKEDQFVDPETGEILSLSDDEYKKLVFKAPYEHFVDTLKSKKFEDSILFSYQVDSKYNRKISGATICGTRKAQLGKDTQEETYVLGKIKDIYSQKGYEDFIKKYKKDKTQFLMYHKDPQTFEKVIEEILKTYPDKELNEKGKEVSCNPFEKYRQENGPVRKYSKKGNGPEIKSLKYYDEVLGKNIDITPKNSLNKVVLRSLNPWRTDVYFNHETRKYEFLGLKYSDLRYLKGEHRYGILIGDYKKIKDKEGIEKESEFKFTLYKNDLILIKDTAKGKEELFRFWSRTGKDNAKTFEKNKIELKPYSKSQFEKGEDTNVLGKLYASSNQLQKSFGTLENLSIYKVRTDVLGNKYFIKKEGDKPQLNFKKKL

SEQ ID NO: 1196 - protein, 1134 aa, Streptococcus mutans; identical to SEQ ID NO: 1195

SEQ ID NO: 1197 - protein, 1128 aa, Streptococcus mutans
MANSKILGLDIGIASVGVGIIDKETGKIIHVNSRIFPAATADSNVERRGFRQGRRLVRRKKHRKVRLADLFLDSNLLTDFSKVSLNLNPYQLRVKGLNEELSNEELFIALKSIVSRRGISYLDDASEDSGANSSEYGKAVEENRKLLEDRTPGQIQLERFEKYGKVRGDFTVVENGENHRLINVFSTSAYKKEAERILRRQQEFNIRIADEFIEAYLTILTGKRKYYHGPGNEKSRTDYGRFRTDGTTLDNIFGILIGKCTFYPDEYRAAKASYTAQEFNLLNDLNNLTVPTETKKLSEEQKRQIIEHAKTVKTLGAPTLLKYIAKLVGCSADDIKGYRIDKSDKPEIHTFEAYRKMRTMELIKVADLSRESLDALAHILTLNTEREGIEEAIRDRFTNKEFNQEQINELVLFRKNNSSLFGKGWHNFSLKLMKELIPELYETSEEQMTILTRLGKQRVKKSSNRTNYIDEKELTEEIYNPVVAKSVRQAIKIINLATKKYGVFDNIVIEMARESNEDDEKKAIQNAQKANEDEKEAALLKAAHQFNGKEELPDSIFHGHKELLTKIRLWHQQGEKCLYTGKTIFINDLIHNPYKYEIDHILPLSLSFDDSLANKVLVLSTANQEKGQRTPFQSLDSMDGAWTYREFKAYVKGLKTLSNKKKDYLLNEEDINKNEVKQKFIERNLVDTRYSSRVVLNTLQDFYKKREFDTKISVVRGQFTSQIRRKWRIEKTRETYHHHAVDALIIAASSQLNLWKKQNNPLISYKEDQFVDPETGEILSLSDDEYKELVFKAPYDHFVDTLKSKKFEDSILFSYQVDSKYNRKISDATIYGTRKARLGKDSQEETYVLGKIKDIYSQKGYEDFIKKYKKDKTQFLMYHKDPQTFEKVIEEILKTYSDKELNEKGKEVPCNPFEKYRQENGPVRKYSKKGNGPEIKSIKYYDNKLGNHIDITPNNSHHQVVLQSLKPWRTDVYFNPKSGKYELMGLKYSDLRFEKVSGDYGISVKKYNEIKSKEGVDENSEFKFTLYKNDLILIKDTESGEQELFRFLSRTMPNQKHYVELKPYDKSKFEGHQKLMDIFGEVAKGGQCLKGLNKSNISIYKVKTDVLGNKYFIKKEGDQPQLNFKKKI

SEQ ID NO: 1198 - protein, 1128 aa, Streptococcus mutans; identical to SEQ ID NO: 1197

SEQ ID NO: 1199 - protein, 1338 aa, Streptococcus mutans
MDLIGTNSVGWAVVTDDYKVPAKKMKVLGNTDKSHIKKNLLGALLFDSGNTAADRRLKRTARRRYTRRRNRILYLQEIFAEEMSKVDDSFFHRLEDSFLVTEDKRGERHPIFGNLEEEVKYHENFPTIYHLRQYLADNPEKVDLRLVYLALAHIIKFRGHFLIEGKFDTRNNDVQRLFQEFLAVYDNTFENSSLQEQNVQVEEILTDKISKSAKKDRVLKLFPNEKSNGRFAEFLKLIVGNQADFKKHFELEEKAPLQFSKDTYEEELEVLLAQIGDNYAELFLSAKKLYDSILLSGILTVTDVSTKAPLSASMIQRYNEHQMDLAQLKQFIRQKLSDKYNEVFSDVSKDGYAGYIDGKTNQEAFYKYLKGLLNKIEGSGYFLDKIEREDFLRKQRTFDNGSIPHQIHLQEMRAIIRRQAEFYPFLADNQDRIEKILTFRIPYYVGPLARGKSDFAWLSRKSADKITPWNFDEIVDKESSAEAFINRMTNYDLYLPNQKVLPKHSLLYEKFTVYNELTKVKYKTEQGKTAFFDANMKQEIFDGVFKVYRKVTKDKLMDFLEKEFDEFRIVDLTGLDKENKAFNASYGTYHDLRKILDKDFLDNSKNEKILEDIVLTLTLFEDREMIRKRLENYSDLLTKEQVKKLERRHYTGWGRLSAELIHGIRNKESRKTILDYLIDDGNSNRNFMQLINDDALSFKEEIAKAQVIGETDNLNQVVSDIAGSPAIKKGILQSLKIVDELVKIMGHQPENIVVEMARENQFTNQGRRNSQQRLKGLTDSIKEFGSQILKEHPVEHSQLQNDRLFLYYLQNGRDMYTGEELDIDYLSQYDIDHIIPQAFIKDNSIDNRVLTSSKENRGKSDDVPSKNVVRKMKSYWSKLLSAKLITQRKFDNLTKAERGGLTDDDKAGFIKRQLVETRQITKHVARILDERFHTETDENNKKIRQVKIVTLKSNLVSNFRKEFELYKVREINDYHHAHDAYLNAVIGKALLGVYPQLEPEFVYGDYPHFHGHKENKATAKKFFYSNIMNFFKKDDVRTDKNGEIIWKKDEHISNIKKVLSYPQVNIVKKVEEQTGGFSKESILPKGNSDKLIPRKTKKFYWDTKKYGGFDSPIVAYSILVIADIEKGKSKKLKTVKALVGVTIMEKMTFERDPVAFLERKGYRNVQEENIIKLPKYSLFKLENGRKRLLASARELQKGNEIVLPNHLGTLLYHAKNIHKVDEPKHLDYVDKHKDEFKELLDVVSNFSKKYTLAEGNLEKIKELYAQNNGEDLKELASSFINLLTFTAIGAPATFKFFDKNIDRKRYTSTTEILNATLIHQSITGLYETRIDLSKLGGD

SEQ ID NO: 1200 - protein, 1338 aa, Streptococcus mutans; identical to SEQ ID NO: 1199

SEQ ID NO: 1201 - protein, 1345 aa, Streptococcus mutans
MKKPYSIGLDIGTNSVGWAVVTDDYKVPAKKMKVLGNTDKSHIEKNLLGALLFDSGNTAEDRRLKRTARRRYTRRRNRILYLQEIFSEEMGKVDDSFFHRLEDFFLVTEDKRGERHPIFGNLEEEVKYHENFPTIYHLRQYLADNPEKVDLRLVYLALAHIIKFRGHFLIEGKFDTRNNDVQRLFQEFLAVYDNTFENSSLQEQNVQVEEILTDKISKSAKKDRVLKLFPNEKSNGRFAEFLKLIVGNQADFKKHFELEEKAPLQFSKDTYEEELEVLLAQIGDNYAELFLSAKKLYDSILLSGILTADDSSTKAPLSASMIQRYNEHQMDLAQLKQFIRQKLSDKYNEVFSDVSKDGYAGYIDGKTNQEAFYKYLKGLLNKIEGSGYFLDKIEREDFLRKQRTFDNGSIPHQIHLQEMRAIIRRQSEFYPFLADNQDRIEKILTFRIPYYVGPLARGKSDFAWLSRKSADKITPWNFDEIVDKESSAEAFINRMTNYDLYLPNQKVLPKHSLLYEKFTVYNELTKVKYKTEQGETAFFDANMKQEIFDGVFKVYRKVTKDKLMDFLEKEFDEFRIVDLTGLDKENKAFNASYGTYHDLRKILDKDFLDNSKNEKILEDIVLTLTLFEDREMIRKRLKNYSDLLTKEQLKKLERRHYTGWGRLSAELIHGIRNKESRKTILDYLIDDGNSNRNFMQLINDDALSFKEEIAKAQVIGETDNLNQVVSDIAGSPAIKKGILQSLKIVDELVKIMGHQPENIVVEMARENQFTNQGRRNSQQRLKGLTDSIKEFGSQILKEHPVENSQLQNDRLFLYYLQNGRDMYTGEELDIDYLSQYDIDHIIPQAFIKDNSIDNRVLTSSKENRGKSDDVPSKDVVRKMKPYWSKLLSAKLITQRKFDNLTKAERGGLTDDDKAGFIKRQLVETRQITKHVARILDERFNTETDENNKKIRQVKIVTLKSNLVSNFRKEFELYKVREINDYHHAHDAYLNAVIGKALLGVYPQLEPEFVYGDYPHFHGHEENKATAKKFFYSNIMNFFKKDDVRTDKNGEIIWKKDEHISNIKKVLSYPQVNIVKKVEEQTGGFSKESILPKGNSDKLIPRKTKKFYWDTKKYGGFDSPIVAYSILVIADIEKGKSKKLKTVKALVGVTIMEKMTFERDPVAFLERKGYRNVQEENIIKLPKYSLFKLENGRKRLLASARELQKGNEIVLPNHLGTLLYHAKNIHKVDEPKHLDYVDKHKDEFKELLDVVSNFSKKYTLAEGNLEKIKELYAQNNGEDLKELASSFINLLTFTAIGAPATFKFFDKNIDRKRYTSTTEILNATLIHQSITGLYETRIDLSKLGGD

SEQ ID NO: 1202 - protein, 1345 aa, Streptococcus mutans; identical to SEQ ID NO: 1201

SEQ ID NO: 1203 - protein, 1229 aa, Streptococcus mutans
MKKPYSIGLDIGTNSVGWAVVTDDYKVPAKKMKVLGNTDKSHIEKNLLGALLFDSGNTAEDRRLKRTARRRYTRRRNRILYLQEIFSEEMGKVDDSFFHRLEDSFLVTEDKRGERHPIFGNLEEEVKYHENFPTIYHLRQYLADNPEKVDLRLVYLALAHIIKFRGHFLIEGKFDTRNNDVQRLFQEFLAVYDNTFENSSLQEQNIQVEEILTDKISKSAKKDRVLKLFPNEKSNGRFAEFLKLIVGNQADFKKHFELEEKAPLQFSKDTYEEELEVLLAQIGDNYAELFLSAKKLYDSILLSGILTVTDVGTKAPLSASMIQRYNEHQMDLTQLKQFIRQKLSDKYNEVFSDVSKDGYAGYIDGKTNQEAFYKYLKGLLNKIEGSGYFLDKIEREDFLRKQRTFDNGSIPHQIHLQEMRAIIRRQAEFYPFLADNQDRIEKILTFRIPYYVGPLARGKSDFAWLSRKSADKITPWNFDEIVDKESSAEAFINRMTNYDLYLPNQKVLPKHSLLYEKFTVYNELTKVKYKTEQGKTAFFDANMKQEIFDGVFKVYRKVTKDKLMDFLEKEFDEFRIVDLTGLDKENKVFNASYGTYHDLCKILDKDFLDNSKNEKILEDIVLTLTLFEDREMIRKRLENYSDLLTKEQVKKLERRHYTGWGRLSAELIHGIRNKESRKTILDYLIDDGNSNRNFMQLINDDALSFKEEIAKAQVIGETDNLNQVVSDIAGSPAIKKGILQSLKIVDELVKIMGHQPENIVVEMARENQFTNQGRRNSQQRLKGLTDSIKEFGSQILKEHPVENSQLQNDRLFLYYLQNGRDMYTGEELDIDYLSQYDIDHIIPQAFIKDNSIDNRVLTSSKENRGKSDDVPSKDVVRKMKPYWSKLLSAKLITQRKFDNLTKAERGGLTDDDKAGFIKRQLVETRQITKHVARILDERFNTETDENNKKIRQVKIVTLKSNLVSNFRKEFELYKVREINDYHHAHDAYLNAVIGKALLGVYPQLEPEFVYGDYPHFHGHEENKATAKKFFYSNIMNFFKKDDVRTDKNGEIIWKKDEHISNIKKVLSYPQVNIVKKVEEQTIGQNGGLFDDNPKSPLEVIPSKLVPLKKALNPEKYGGYQKPTTAYPILLIVDTKQLIPISVMDKKRFEQNPVKFLKDKGYQQIEKNNFVKLPKYTLVDIGNGIKRLWASSKEVHKGNQLVVSKKSQDLLYHAHHLDNDYSNEYVKNHY

SEQ ID NO: 1204 - protein, 1229 aa, Streptococcus mutans; identical to SEQ ID NO: 1203

SEQ ID NO: 1205 - protein, 1345 aa, Streptococcus mutans
MKKPYSIGLDIGTNSVGWAVVTDDYKVPAKKMKVLGNTDKSHIEKNLLGALLFDSGNTAEDRRLKRTARRRYTRRRNRILYLQEIFSEEMGKVDDSFFHRLEDSFLVTEDKRGERHPIFGNLEEEVKYHENFPTIYHLRQYLADNPEKVDLRLVYLALAHIIKFRGHFLIEGKFDTRNNDVQRLFQEFLAVYDNTFENSSLQEQNVQVEEILTDKISKSAKKDRVLKLFPNEKSNGRFAEFLKLIVGNQADFKKHFELEEKAPLQFSKDTYEEELEVLLAQIGDNYAELFLSAKKLYDSILLSGILTVTDVGTKAPLSASMIQRYNEHQMDLAQLKQFIRQKLSDKYNEVFSDVSKDGYAGYIDGKTNQEAFYKYLKGLLNKIEGSGYFLDKIEREDFLRKQRTFDNGSIPHQIHLQEMRAIIRRQAEFYPFLADNQDRIEKLLTFRIPYYVGPLARGKSDFAWLSRKSADKITPWNFDEIVDKESSAEAFINRMTNYDLYLPNQKVLPKHSLLYEKFTVYNELIKVKYKTEQGKTAFFDANMKQEIFDGVFKVYRKVTKDKLMDFLEKEFDEFRIVDLTGLDKENKVFNASYGTYHDLCKILDKDFLDNSKNEKILEDIVLTLTLFEDREMIRKRLENYSDLLTKEQVKKLERRHYTGWGRLSAELIHGIRNKESRKTILDYLIDDGNSNRNFMQLINDDALSFKEEIAKAQVIGETDNLNQVVSDIAGSPAIKKGILQSLKIVDELVKIMGHQPENIVVEMARENQFTNQGRRNSQQRLKGLTDSIKEFGSQILKEHPVENSQLQNDRLFLYYLQNGRDMYTGEELDIDYLSQYDIDHIIPQAFIKDNSIDNRVLTSSKENRGKSDDVPSKDVVRKMKSYWSKLLSAKLITQRKFDNLTKAERGGLTDDDKAGFIKRQLVETRQITKHVARILDERFNTETDENNKKIRQVKIVTLKSNLVSNFRKEFELYKVREINDYHHAHDAYLNAVIGKALLGVYPQLEPEFVYGDYPHFHGHKENKATAKKFFYSNIMNFFKKDDVRTDKNGEIIWKKDEHISNIKKVLSYPQVNIVKKVEEQTGGFSKESILPKGNSDKLIPRKTKKFYWDTKKYGGFDSPIVAYSILVIADIEKGKSKKLKTVKALVGVTIMEKMTFERDPVAFLERKGYRNVQEENIIKLPKYSLFKLENGRKRLLASARELQKGNEIVLPNHLGTLLYHAKNIHKVDEPKHLDYVDKHKDEFKELLDVVSNFSKKYTLAEGNLEKIKELYAQNNGEDLKELASSFINLLTFTAIGAPATFKFFDKNIDRKRYTSTTEILNATLIHQSITGLYETRIDLNKLGGD

SEQ ID NO: 1206 - protein, 1350 aa, Streptococcus mutans
MKKPYSIGLDIGTNSVGWAVVTDDYKVPAKKMKVLGNTDKSHIEKNLLGALLFDSGNTAEDRRLKRTARRRYTRRRNRILYLQEIFSEEMGKVDDSFFHRLEDSFLVTEDKRGERHPIFGNLEEEVKYHENFPTIYHLRQYLADNPEKVDLRLVYLALAHIIKFRGHFLIEGKFDTRNNDVQRLFQEFLAVYDNTFENSSLQEQNVQVEEILTDKISKSAKKDRVLKLFPNEKSNGRFAEFLKLIVGNQADFKKHFELEEKAPLQFSKDTYEEELEVLLAQIGDNYAELFLSAKKLYDSILLSGILTVTDVSTKAPLSASMIQRYNEHQMDLTQLKQFIRQKLSDKYNEVFSDVSKDGYAGYIDGKTNQEAFYKYLKGLLNKIEGSGYFLDKIEREDFLRKQRTFDNGSIPHQIHLQEMRAIIRRQAEFYSFLADNQDRIEKILTFRIPYYVGPLARGKSDFAWLSRKSADKITPWNFDEIVDKESSAEAFINRMTNYDLYLPNQKVLPKHSLLYEKFTVYNELTKVKYKTEQGKTAFFDANMKQEIFDGVFKVYRKVTKDKLMDFLEKEFDEFRIVDLTGLDKENKAFNASYGTYHDLRKILDKDFLDNSKNEKILEDIVLTLTLFEDREMIRKRLENYSDLLTKEQVKKLERRHYTGWGRLSAELIHGIRNKESRKTILDYLIDDGNSNRNFMQLINDDALSFKEEIAKAQVIGETDNLNQVVSDIAGSPAIKKGILQSLKIVDELVKIMGHQPENIVVEMARENQFTNQGRRNSQQRLKGLTDSIKEFGSQILKEHPVENSQLQNDRLFLYYLQNGRDMYTGEELDIDYLSQYDIDHIIPQAFIKDNSIDNRVLTSSKENRGKSDDVPSEDVVNRMRPFWNKLLSSGLISQRKYNNLTKKELTLDDKAGFIKRQLVETRQITKHVARMLDERFNKEFDDNNKRIRKVKIVTLKSNLVSSFRKEFELYKVREINDYHHAHDAYLNAVVVKALLVKYSKLEPEFVYGEYPKYNSYRERKTATQKMFFYSNIMNMFKSKVKLADDQIVERPMIEVNDETGEIAWDKTKHITTVKKVLSYPQVNIVKKVEEQTIGQNGGLFDDNPKSPLEVIPSKLVPLKKALNPEKYGGYQKPTTAYPILLIVDTKQLIPISVMDKKRFEQNPVKFLKDKGYQQIEKNNFVKLPKYTLVDIGNGIKRLWASSKEVHKGNQLVVSKKSQDLLYHAHHLDNDYSNEYVKNHYQQFDILFNEITSFSKKCKLGKEHIQKIEEAYSKERDSASIEELADGFIKLLGFTQLGATSPFSFLGIKLNQKQYTGKKDYLLPCMEATLIHQSITGLYETRIDLSKLGGD

SEQ ID NO: 1207 - protein, 1350 aa, Streptococcus mutans
MKKPYSIGLDIGTNSVGWAVVTDDYKVPAKKMKVLGNTDKSHIEKNLLGALLFDSGNTAEDRRLKRTARRRYTRRRNRILYLQEIFSEEMGKVDDSFFHRLEDSFLVTEDKRGERHPIFGNLEEEVKYHENFPTIYHLRQYLADNPEKVDLRLVYLALAHIIKFRGHFLIEGKFDTRNNDVQRLFQEFLAVYDNTFENSSLQEQNVQVEEILTDKISKSAKKDRVLKLFPNEKSNGRFAEFLKLIVGNQADFKKHFELEEKAPLQFSKDTYEEELEVLLAQIGDNYAELFLSAKKLYDSILLSGILTVTDVSTKAPLSASMIQRYNEHQMDLTQLKQFIRQKLSDKYNEVFSDVSKDGYAGYIDGKTNQEAFYKYLKGLLNKIEGSGYFLDKIEREDFLRKQRTFDNGSIPHQIHLQEMRAIIRRQAEFYPFLADNQDRIEKILTFRIPYYVGPLARGKSDFAWLSRKSADKITPWNFDEIVDKESSAEAFINRMTNYDLYLPNQKVLPKHSLLYEKFTVYNELTKVKYKTEQGKTAFFDANMKQEIFDGVFKVYRKVTKDKLMDFLEKEFDEFRIVDLTGLDKENKAFNASYGTYHDLRKILDKDFLDNSKNEKILEDIVLTLTLFEDREMIRKRLKNYSDLLTKEQLKKLERRHYTGWGRLSAELIHGIRNKESRKTILDYLIDDGNSNRNFMQLINDDALSFKEEIAKAQVIGETDNLNQVVSDIAGSPAIKKGILQSLKIVDELVKIMGHQPENIVVEMARENQFTNQGRQNSQQRLKGLTDSIKEFGSQILKEHPVENSQLQNDRLFLYYLQNGRDMYTGEELDIDYLSQYDIDHIIPQAFIKDNSIDNRVLTSSKENRGKSDDVPSEDVVNRMRPFWNKLLSSGLISQRKYNNLTKKELTLDDKAGFIKRQLVETRQITKHVARMLDERFNKEFDDNNKRICKVKIVTLKSNLVSSFRKEFELYKVREINDYHHAHDAYLNAVVVKALLVKYSKLEPEFVYGEYPKYNSYRERKTATQKMFFYSNIMNMFKSKVKLADDQIVERPMIEVNDETGEIAWDKTKHITTVKKVLSYPQVNIVKKVEEQTIGQNGGLFDDNPKSPLEVIPSKLVPLKKALNPEKYGGYQKPTTAYPILLIVDTKQLIPISVMDKKRFEQNPVKFLKDKGYQQIEKNNFVKLPKYTLVDIGNGIKRLWASSKEVHKGNQLVVSKKSQDLLYHAHHLDNDYSNEYVKNHYQQFDILFNEITSFSKKCKLGKEHIQKIEEAYSKERDSASIEELADGFIKLLGFTQLGATSPFSFLGIKLNQKQYTGKKDYLLPCMEATLIHQSITGLYETRIDLSKLGGD

SEQ ID NO: 1208 - protein, 1345 aa, Streptococcus mutans; identical to SEQ ID NO: 1205

SEQ ID NO: 1209 - protein, 1350 aa, Streptococcus mutans; identical to SEQ ID NO: 1206

SEQ ID NO: 1210 - protein, 1350 aa, Streptococcus mutans; identical to SEQ ID NO: 1207

SEQ ID NO: 1211 - protein, 1345 aa, Streptococcus mutans
MKKPYSIGLDIGTNSVGWAVVTDDYKVPAKKMKVLGNTDKSHIKKNLLGALLFDSGNTAADRRLKRTARRRYTRRRNRILYLQEIFAEEMSKVDDSFFHRLEDSFLVTEDKRGERHPIFGNLEEEVKYHENFPTIYHLRQYLADNPEKVDLRLVYLALAHIIKFRGHFLIEGKFDTRNNDVQRLFQEFLAVYDNTFENSSLQEQNVQVEEILTDKISKSAKKDRVLKLFPNEKSNGRFAEFLKLIVGNQADFKKHFELEEKAPLQFSKDTYEEELEVLLTQIGDNYAELFLSAKKLYDSILLSGILTVTDVSTKAPLSASMIQRYNEHQMDLAQLKQFIRQKLSDKYNEVFSDVSKDGYAGYIDGKTNQEAFYKYLKGLLNKIEGSGYFLDKIEREDFLRKQRTFDNGSIPHQIHLQEMRAIIRRQAEFYPFLADNQDRIEKILTFRIPYYVGPLARGKSDFAWLSRKSADKITPWNFDEIVDKESSAEAFINRMTNYDLYLPNQKVLPKHSLLYEKFTVYNELTKVKYKTEQGKTAFFDANMKQEIFDGVFKVYRKVTKDKLMDFLEKEFDEFRIVDLTGLDKENKAFNASYGTYHDLRKILDKDFLDNSKNEKILEDIVLTLTLFEDREMIRKRLENYSDLLTKEQVKKLERRHYTGWGRLSAELIHGIRNKESRKTLLDYLIDDGNSNRNFMQLINDDALSFKEEIAKAQVIGETDNLNQVVSDIAGSPAIKKGILQSLKIVDELVKIMGHQPENIVVEMARENQFTNQGRRNSQQRLKGLTDSIKEFGSQILKEHPVENSQLQNDRLFLYYLQNGRDMYTGEELDIDYLSQYDIDHIIPQAFIKDNSIDNRVLTSSKENRGKSDDVPSKDVVRKMKPYWSKLLSAKLITQRKFDNLTKAERGGLTDDDKAGFIKRQLVETRQITKHVARILDERFNTETDENNKKIRQVKIVTLKSNLVSNFRKEFELYKVREINDYHHAHDAYLNAVIGKALLGVYPQLEPEFVYGDYPHFHGHEENKATAKKFFYSNIMNFFKKDDVRTDKNGEIIWKKDEHISNIKKVLSYPQVNIVKKVEEQTGGFSKESILPKGNSDKLIPRKTKKFYWDTKKYGGFDSPIVAYSILVIADIEKGKSKKLKTVKALVGVTIMEKMTFERDPVAFLERKGYRNVQEENIIKLPKYSLFKLENGRKRLLASARELQKGNEIVLPNHLGTLLYHAKNIHKVDEPKHLDYVDKHKDEFKELLDVVSNFSKKYTLAEGNLEKIKELYAQNNGEDLKELSSSFINLLTFTAIGAPAAFKFFDKNIDRKRYTSTTEILNATLIHQSITGLYETRIDLSKLGGD

SEQ ID NO: 1212 - protein, 1345 aa, Streptococcus mutans
MKKPYSIGLDIGTNSVGWAVVTDDYKVPAKKMKVLGNTDKSHIKKNLLGALLFDSGNTAADRRLKRTARRRYTRRRNRILYLQEIFAEEMSKVDDSFFHRLEDSFLVTEDKRGERHPIFGNLEEEVKYHENFPTIYHLRQYLADNPEKVDLRLVYLALAHIIKFRGHFLIEGKFDTRNNDVQRLFQEFLAVYDNTFENSSLQEQNVQVEEILTDKISKSAKKDRVLKLFPNEKSNGRFAEFLKLIVGNQADFKKHFELEEKAPLQFSKDTYEEELEVLLAQIGDNYAELFLSAKKLYDSILLSGILTVTDVSTKAPLSASMIQRYNEHQMDLAQLKQFIRQKLSDKYNEVFSDVSKDGYAGYIDGKTNQEAFYKYLKGLLNKIEGSGYFLDKIEREDFLRKQRTFDNGSIPHQIHLQEMRAIIRRQAEFYPFLADNQDRIEKILTFRIPYYVGPLARGKSDFAWLSRKSADKITPWNFDEIVDKESSAEAFINRMTNYDLYLPNQKVLPKHSLLYEKFTVYNELTKVKYKTEQGKTAFFDANMKQEIFDGVFKVYRKVTKDKLMDFLEKEFDEFRIVDLTGLDKENKAFNASYGTYHDLRKILDKDFLDNSKNEKILEDIVLTLTLFEDREMIRKRLENYSDLLTKEQVKKLERRHYTGWGRLSAELIHGIRNKESRKTILDYLIDDGNSNRNFMQLINDDALSFKEEIAKAQVIGETDNLNQVVSDIAGSPAIKKGILQSLKIVDELVKIMGHQPENIVVEMARENQFTNQGRRNSQQRLKGLTDSIKEFGSQILKEHPVEHSQLQNDRLFLYYLQNGRDMYTGEELDIDYLSQYDIDHIIPQAFIKDNSIDNRVLTSSKENRGKSDDVPSKNVVRKMKSYWSKLLSAKLITQRKFDNLTKAERGGLTDDDKAGFIKRQLVETRQITKHVARILDERFHTETDENNKKIRQVKIVTLKSNLVSNFRKEFELYKVREINDYHHAHDAYLNAVIGKALLGVYPQLEPEFVYGDYPHFHGHKENKATAKKFFYSNIMNFFKKDDVRTDKNGEIIWKKDEHISNIKKVLSYPQVNIVKKVEEQTGGFSKESILPKGNSDKLIPRKTKKFYWDTKKYGGFDSPIVAYSILVIADIEKGKSKKLKTVKALVGVTIMEKMTFERDPVAFLERKGYRNVQEENIIKLPKYSLFKLENGRKRLLASARELQKGNEIVLPNHLGTLLYHAKNIHKVDEPKHLDYVDKHKDEFKELLDVVSNFSKKYTLAEGNLEKIKELYAQNNGEDLKELASSFINLLTFTAIGAPATFKFFDKNIDRKRYTSTTEILNATLIHQSITGLYETRIDLSKLGGD

SEQ ID NO: 1213 - protein, 1345 aa, Streptococcus mutans
MKKPYSIGLDIGTNSVGWAVVTDDYKVPAKKMKVLGNTDKSHIKKNLLGALLFDSGNTAADRRLKRTARRRYTRRRNRILYLQEIFAEEMSKVDDSFFHRLEDSFLVTEDKRGERHPIFGNLEEEVKYHENFPTIYHLRQYLADNPEKVDLRLVYLALAHIIKFRGHFLIEGKFDTRNNDVQRLFQEFLAVYDNTFENSSLQEQNVQVEEILTDKISKSAKKDRVLKLFPNEKSNGRFAEFLKLIVGNQADFKKHFELEEKAPLQFSKDTYEEELEVLLAQIGDNYAELFLSAKKLYDSILLSGILTVTDVSTKAPLSASMIQRYNEHQMDLAQLKQFIRQKLSDKYNEVFSDVSKDGYAGYIDGKTNQEAFYKYLKGLLNKIEGSGYFLDKIEREDFLRKQRTFDNGSIPHQIHLQEMRAIIRRQAEFYPFLADNQDRIEKILTFRIPYYVGPLARGKSDFAWLSRKSADKITPWNFDEIVDKESSAEAFINRMTNYDLYLPNQKVLPKHSLLYEKFTVYNELTKVKYKTEQGKTAFFDANMKQEIFDGVFKVYRKVTKDKLMDFLEKEFDEFRIVDLTGLDKENKVFNASYGTYHDLCKILDKDFLDNSKNEKILEDIVLTLTLFEDREMIRKRLENYSDLLTKEQVKKLERRHYTGWGRLSAELIHGIRNKESRKTILDYLIDDGNSNRNFMQLINDDALSFKEEIAKAQVIGETDNLNQVVSDIAGSPAIKKGILQSLKIVDELVKIMGHQPENIVVEMARENQFTKQGRRNSQQRLKGLTDSIKEFGSQILKEHPVENSQLQNDRLFLYYLQNGRDMYTGEELDIDYLSQYDIDHIIPQAFIKDNSIDNRVLTSSKENRGKSDDVPSKDVVRKMKSYWSKLLSAKLITQRKFDNLTKAERGGLTDDDKAGFIKRQLVETRQITKHVARILDERFYTETDENNKKIRQVKIVTLKSNLVSNFRKEFELYKVREINDYHHAHDAYLNAVIGKALLGVYPQLEPEFVYGDYPHFHGHKENKATAKKFFYSNIMNFFKKDDVRTDKNGEIIWKKDEHISNIKKVLSYPQVNIVKKVEEQTGGFSKESILPKGNSDKLIPRKTKKFYWDTKKYGGFDSPIVAYSILVIADIEKGKSKKLKTVKALVGVTIMEKMTFERDPVAFLERKGYRNVQEENIIKLPKYSLFKLENGRKRLLASARELQKGNEIVLPNHLGTLLYHAKNIHKVDEPKHLDYVDKHKDEFKELLDVVSNFSKKYTLAEGNLEKIKELYAQNNGEDLKELASSFINLLTFTAIGAPATFKFFDKNIDRKRYTSTTEILNATLIHQSITGLYETRIDLSKLGGD

SEQ ID NO: 1214 - protein, 1345 aa, Streptococcus mutans
MKKPYSIGLDIGTNSVGWAVVTDDYKVPAKKMKVLGNTDKSHIKKNLLGALLFDSGNTAADRRLKRTARRRYTRRRNRILYLQEIFAEEMSKVDDSFFHRLEDSFLVTEDKRGERHPIFGNLEEEVKYHENFPTIYHLRQYLADNPEKVDLRLVYLALAHIIKFRGHFLIEGKFDTRNNDVQRLFQEFLAVYDNTFENSSLQEQNVQVEEILTDKISKSAKKDRVLKLFPNEKSNGRFAEFLKLIVGNQADFKKHFELEEKAPLQFSKDTYEEELEVLLAQIGDNYAELFLSAKKLYDSILLSGILTVTDVSTKAPLSASMIQRYNEHQMDLAQLKQFIRQKLSDKYNEVFSDVSKDGYAGYIDGKTNQEAFYKYLKGLLNKIEGSGYFLDKIEREDFLRKQRTFDNGSIPHQIHLQEMRAIIRRQAEFYPFLADNQDRIEKILTFRIPYYVGPLARGKSDFAWLSRKSADKITPWNFDEIVDKESSAEAFINRMTNYDLYLPNQKVLPKHSLLYEKFTVYNELTKVKYKTEQGKTAFFDANMKQEIFDGVFKVYRKVTKDKLMDFLEKEFDEFRIVDLTGLDKENKAFNASYGTYHDLRKILDKDFLDNSKNEKILEDIVLTLTLFEDREMIRKRLENYSDLLTKEQVKKLERRHYTGWGRLSAELIHGIRNKESRKTILDYLIDDGNSNRNFMQLINDDALSFKEEIAKAQVIGETDNLNQVVSDIAGSPAIKKGILQSLKIVDELVKIMGHQPENIVVEMARENQFTNQGRRNSQQRLKGLTDSIKEFGSQILKEHPVENSQLQNDRLFLYYLQNGRDMYTGEELDIDYLSQYDIDHIIPQAFIKDNSIDNRVLTSSKENRGKSDDVPSKNVVRKMKSYWSKLLSAKLITQRKFDNLTKAERGGLTDDDKAGFIKRQLVETRQITKHVARILDERFHTETDENNKKIRQVKIVTLKSNLVSNFRKEFELYKVREINDYHHAHDAYLNAVIGKALLGVYPQLEPEFVYGDYPHFHGHKENKATAKKFFYSNIMNFFKKDDVRTDKNGEIIWKKDEHISNIKKVLSYPQVNIVKKVEEQTGGFSKESILPKGNSDKLIPRKTKKFYWDTKKYGGFDSPIVAYSILVIADIEKGKSKKLKTVKALVGVTIMEKMTFERDPVAFLERKGYRNVQEENIIKLPKYSLFKLENGRKRLLASARELQKGNEIVLPNHLGTLLYHAKNIHKVDEPKHLDYVDKHKDEFKELLDVVSNFSKKYTLAEGNLEKIKELYAQNNGEDLKELSSSFINLLTFTAIGAPAAFKFFDKNIDRKRYTSTTEILNATLIHQSITGLYETRIDLSKLGGD

SEQ ID NO: 1215 - protein, 1345 aa, Streptococcus mutans; identical to SEQ ID NO: 1211

SEQ ID NO: 1216 - protein, 1345 aa, Streptococcus mutans; identical to SEQ ID NO: 1212

SEQ ID NO: 1217 - protein, 1345 aa, Streptococcus mutans; identical to SEQ ID NO: 1213

SEQ ID NO: 1218 - protein, 1345 aa, Streptococcus mutans; identical to SEQ ID NO: 1214

SEQ ID NO: 1219 - protein, 1345 aa, Streptococcus mutans; identical to SEQ ID NO: 1212

SEQ ID NO: 1220 - protein, 1345 aa, Streptococcus mutans; identical to SEQ ID NO: 1212

SEQ ID NO: 1221 - protein, 1345 aa, Streptococcus mutans; identical to SEQ ID NO: 1212

SEQ ID NO: 1222 - protein, 1345 aa, Streptococcus mutans; identical to SEQ ID NO: 1212

SEQ ID NO: 1223 - protein, 1359 aa, Streptococcus mutans
MKKPYSIGLDIGTNSVGWAVVTDDYKVPAKKMKVLGNTDKSHIKKNLLGALLFDSGNTAEDRRLKRTARRRYTRRRNRILYLQEIFAEEMMQVDESFFQRLDDSFLVEEDKRGSRYPIFGTLKEEKKYHKEFKTIYHLREKLANSTEKADLRLVYLSLAHMIKFRGHFLIEGQLKAENTNVQALFKDFVEVYDKTVEESHLSEMTVDALSILTEKVSKSRRLENLVECYPTEKKNTLFGNLIALSLGLQPNFKTNFQLSEDAKLQFSKDTYEEDLEGLLGEIGDEYADLFASAKNLYDAILLSGILAVDDNTTKAPLSASMVKRYKEHKEELAAFKRFIKEKLPKKYEEIFKDDTKNGYAGYVGADKKLRKRSGKLATEEEFYKYVKGILNKVEGADVWLDKIDREDFLRKQRTFDNGSIPHQIHLQEMHAILRRQGEHYPFLKENQDKIEKILTFRIPYYVGPLVRKGSRFAWAEYKADEKITPWNFDDILDKEKSAEKFITRMTLNDLYLPEEKVLPKHSLLYETFTVYNELTKVKYVNEQGEAKFFDANMKQEIFDHVFKENRKVTKDKLLNYLNKEFEEFRIVNLTGLDKENKVFNSSLGTYHDLRKILNKSFLDNKENEQIIEDIIQTLTLFEDREMIRQRLQKYSDIFTKAQLKKLERRHYTGWGRLSYKLINGIRDKQSNKTILGYLIDDGYSNRNFMQLINDDALSFKEEIAKAQVIGEMDGLNQVVSDIAGSPAIKKGILQSLKIVDELVKVMGHNPANIVIEMARENQTTAKGRRSSQKRYKRLEEAIKNLDHDLNHKILKEHPTDNQALQNDRLFLYYLQNGRDMYTEDPLDINRLSDYDIDHIIPQAFIKDNSIDNRVLTRSDKNRGKSDDVPSEEVVHKMKPFWSKLLSAKLITQRKFDNLTKAERGGLTDDDKAGFIKRQLVETRQITKHVARILDERFNTETDENNKKIRQVKIVTLKSNLVSNFRKEFELYKVREINDYHHAHDAYLNAVIGKALLGVYPQLEPEFVYGDYPHFHGHKENKATAKKFFYSNIMNFFKKGDVRTDKNGEIIWKKDEHISNIKKVLSYPQVNIVKKVEEQTGGFSKESILPKGNSDKLIPRKTKKFYWDTKKYGGFDSPIVAYSILVIADIEKGKSKKLKTVKALVGVTIMEKMTFERDPVAFLERKGYRNVQEENIIKLPKYSLFKLENGRKRLLASARELQKGNEIVLPNHLETLLYHAKNIHKVDEPKHLDYVDKHKDEFKELLDVVSNFSKKYTLAEGNLEKIKELYAQNNGEDLKELASSFINLLTFTAIGAPAAFKFFDKNIDRKRYTSTTEILNATLIHQSITGLYETRIDLNKLGGD

SEQ ID NO: 1224 - protein, 1359 aa, Streptococcus mutans; identical to SEQ ID NO: 1223

SEQ ID NO: 1225 - protein, 1355 aa, Streptococcus mutans
MKKPYSIGLDIGTNSVGWAVVTDDYKVPAKKMKVLGNTDKSHIKKNLLGALLFDSGNTAEDRRLKRTARRRYTRRRNRILYLQEIFAEEMSKVDDSFFHRLDESFLTDDDKNFDSHPIFGNKAEEDAYHQKFPTIYHLRKHLADSTEKADLRLVYLALAHMIKFRGHFLIEGELNAENTDVQKLFADFVGVYDRTFDDSHLSEITVDASSILTEKISKSRRLEKLINNYPKEKKNTLFGNLIALSLGLQPNFKTNFKLSEDAKLQFSKDTYEEDLEELLGKIGDDYADLFTLAKNLYDAILLSGILTADDSSTKAPLSASMIKRYAEHHEDLEKLKEFIKANKPELYHDIFKDETKNGYAGYIENGVKQDEFYKYLKNTLSKITGSDYFLDQIEREDFLRKQRTFDNGSIPHQIHLQEMHAILRRQGDYYPFLKENQDRIEKILTFRIPYYVGPLARKNSRFAWAEYHSDEAVTPWNFDQVIDKESSAQAFIEHMTNNDLYLPNEKVLPKHSPLYEKYTVYNELTKIKYVTEIGEAKFFDANLKQEIFDGLFKHERKVTKKKLRTFLDKNFDEFRIVDIQGLDKETETFNASYATYQDLLKVIKDKVFMDNPENAEILENIVLTLTLFEDREMIKQRLAKYADVFDKKVIDQLARRHYTGWGRLSAKLLNGIRDKQSCKTIMDYLIDDAQSNRNLMQLITDDNLTFKDDIVKAQYVDNSDDLHQVVQSLAGSPAIKKGILQSLKIVDELVKVMGKEPEQIVVEMARENQTTAKGRRNSQQRYKRLKEAIKSLDRDLNHKILKEHPTDNQALQNNRLFLYYLQNGRDMYTGESLDINRLSDYDIDHVIPQAFIKDNSIDNRVLTSSKANRGKSDDVPSEDVVNRMRPFWNKLLSSGLISQRKYNNLTKKELTLDDKAGFIKRQLVETRQITKHVARMLDERFNKEFDDNNKRIRRVKIVTLKSNLVSSFRKEFELYKVREINDYHHAHDAYLNAVVVKALLVKYPKLEPEFVYGEYPKYNSYRERKTATQKMFFYSNIMNMFKSKVKLADDQIVERPMIEVNDETGEIAWDKTKHITTVKKVLSYPQVNIVKKVEEQTIGQNGGLFDDNPKSPLEVIPSKLVPLKKALNPEKYGGYQKPTTAYPILLIVDTKQLIPISVMDKKRFEQNPVKFLKDKGYQQIEKNNFVKLPKYTLVDIGNGIKRLWASSKEVHKGNQLVVSKKSQDLLYHAHHLDNDYSNEYVKNHYQQFDILFNEITSFSKKCKLGKEHIQKIEEAYSKERDFASIEELADGFIKLLGFTQLGATSPFSFLGIKLNQKQYTGKKDYLLPCMEATLIHQSITGLYETRIDLSKLGGD

SEQ ID NO: 1226 - protein, 1355 aa, Streptococcus mutans; identical to SEQ ID NO: 1225

SEQ ID NO: 1227 - protein, 1345 aa, Streptococcus mutans
MKKPYSIGLDIGTNSVGWAVVTDDYKVPAKKMKVLGNTDKSHIKKNLLGALLFDSGNTAEDRRLKRTARRRYTRRRNRILYLQEIFSEEMDKVDDSFFHRLEDSFLVTEDKRGERHPIFGNLEEEVKYHENFPTIYHLRQYLADNPEKVDLRLVYLALAHIIKFRGHFLIEGKFDTRNNDVQRLFQEFLAVYDNTFENSSLQEQNVQVEEILTDKISKSAKKDRVLKLFPNEKSNGRFAEFLKLIVGNQADFKKHFELEEKAPLQFSKDTYEEELEVLLAQIGDNYAELFLSAKKLYDSILLSGILTVTDVSTKAPLSASMIQRYNEHQMDLAQLKQFIRQKLSDKYNEVFSDVSKDGYAGYIDGKTNQEAFYKYLKGLLNKIEGSGYFLDKIEREDFLRKQRTFDNGSIPHQIHLQEMRAIIRRQAEFYPFLADNQDRIEKILTFRIPYYVGPLARGKSDFAWLSRKSADKITPWNFDEIVDKESSAEAFINRMTNYDLYLPNQKVLPKHSLLYEKFTVYNELTKVKYKTEQGKTAFFDANMKQEIFDGVFKVYRKVTKDKLMDFLEKEFDEFRIVDLTGLDKENKVFNASYGTYHDLCKILDKDFLDNSKNEKILEDIVLTLTLFEDREMIRKRLENYSDLLTKEQVKKLERRHYTGWGRLSAELIHGIRNKESRKTILDYLIDDGNSNRNFMQLINDDALSFKEEIAKAQVIGETDNLNQVVSDIAGSPAIKKGILQSLKIVDELVKIMGHQPENIVVEMARENQFTKQGRRNSQQRLKGLTDSIKEFGSQILKEHPVENSQLQNDRLFLYYLQNGRDMYTGEELDIDYLSQYDIDHIIPQAFIKDNSIDNRVLTSSKENRGKSDDVPSKDVVRKMKSYWSKLLSAKLITQRKFDNLTKAERGGLTDDDKAGFIKRQLVETRQITKHVARILDERFYTETDENNKKIRQVKIVTLKSNLVSNFRKEFELYKVREINDYHHAHDAYLNAVIGKALLGVYPQLEPEFVYGDYPHFHGHKENKATAKKFFYSNIMNFFKKDDVRTDKNGEIIWKKDEHISNIKKVLSYPQVNIVKKVEEQTGGFSKESILPKGNSDKLIPRKTKKFYWDTKKYGGFDSPIVAYSILVIADIEKGKSKKLKTVKALVGVTIMEKMTFERDPVAFLERKGYRNVQEENIIKLPKYSLFKLENGRKRLLASARELQKGNEIVLPNHLGTLLYHAKNIHKVDEPKHLDYVDKHKDEFKELLDVVSNFSKKYTLAEGNLEKIKELYAQNNGEDLKELASSFINLLTFTAIGAPATFKFFDKNIDRKRYTSTTEILNATLIHQSITGLYETRIDLSKLGGD

SEQ ID NO: 1228 - protein, 1345 aa, Streptococcus mutans; identical to SEQ ID NO: 1227

SEQ ID NO: 1229 - protein, 1345 aa, Streptococcus mutans
MKKPYSIGLDIGTNSVGWAVVTDDYKVPAKKMKVLGNTDKSHIKKNLLGALLFDSGNTAEDRRLKRTARRRYTRRRNRILYLQEIFSEEMGKVDDSFFHRLDESFLTDDDKNFDSHPIFGNKAEEDAYHQKFPTIYHLRKHLADSTEKADLRLVYLALAHMIKFRGHFLIEGELNAENTDVQKLFADFVGVYDRTFDDSHLSEITVDASSILTEKISKSRRLEKLINNYPKEKKNTLFGNLIALSLGLQPNFKTNFKLSEDAKLQFSKDTYEEELEVLLAQIGDNYAELFLSAKKLYDSILLSGILTVTDVSTKAPLSASMIQRYNEHQMDLAQLKQFIRQKLSDKYNEVFSDVSKDGYAGYIDGKTNQEAFYKYLKGLLNKIEGSGYFLDKIEREDFLRKQRTFDNGSIPHQIHLQEMRAIIRRQAEFYPFLADNQDRIEKILTFRIPYYVGPLARGKSDFAWLSRKSADKITPWNFDEIVDKESSVEAFINRMTNYDLYLPNQKVLPKHSLLYEKFTVYNELTKVKYKTEQGKTAFFDANMKQEIFDGVFKVYRKVTKDKLMDFLEKEFDEFRIVDLTGLDKENKAFNASYGTYHDLRKILDKDFLDNSKNEKILEDIVLTLTLFEDREMIRKRLKNYSDLLTKEQLKKLERRHYTGWGRLSAELIHGIRNKESRKTILDYLIDDGNSNRNFMQLINDDALSFKEEIAKAQVIGETDNLNQVVSDIAGSPAIKKGILQSLKIVDELVKIMGHQPENIVVEMARENQFTNQGRRNSQQRLKGLTDSIKEFGSQILKEHPVENSQLQNDRLFLYYLQNGRDMYTGEELDIDYLSQYDIDHIIPQAFIKDNSIDNRVLTSSKENRGKSDDVPSKDVVRKMKSYWSKLLSAKLITQRKFDNLTKGERGGLTDDDKAGFIKRQLVETRQITKHVARILDERFNTETDENNKKIRQVKIVTLKSNLVSNFRKEFELYKVREINDYHHAHDAYLNAVIGKALLGVYPQLEPEFVYGDYPHFHGHKENKATAKKFFYSNIMNFFKKDDVRTDKNGEIIWKKDEYISNIKKVLSYPQVNIVKKVEEQTGGFSKESILPKGDSDKLIPRKTKKFYWDTKKYGGFDSPIVAYSILVIADIEKGKSKKLKTVKALVGVTIMEKMTFERDPVAFLERKGYRNVQEENIIKLPKYSLFKLENGRKRLLASARELQKGNEIVLPNHLGTLLYHAKNIHKVDEPKHLDYVDKHKDEFKELLDVVSNFSKKYTLAEGNLEKIKELYAQNNGEDLKELASSFINLLTFTAIGAPATFKFFDKNIDRKRYTSTTEILNATLIHQSITGLYETRIDLSKLGGD

SEQ ID NO: 1230 - protein, 1345 aa, Streptococcus mutans
MKKPYSIGLDIGTNSVGWAVVTDDYKVPAKKMKVLGNTDKSHIKKNLLGALLFDSGNTAEDRRLKRTARRRYTRRRNRILYLQEIFSEEMGKVDDSFFHRLDESFLTDDDKNFDSYPIFGNKAEEDAYHQKFPTIYHLRKHLADSTEKADLRLVYLALAHMIKFRGHFLIEGELNAENTDVQKLFADFVGVYDRTFDDSHLSEITVDASSILTEKISKSRRLEKLINNYPKEKKNTLFRNLVALSLGLQPNFKTNFKLSEDAKLQFSKDTYEEDLEELLGKIGDDYADLFTLAKNLYDAILLSGILTADDSSTKAPLSASMIKRYAEHHEDLEKLKEFIKANKPELYHDIFKDETKNGYAGYIENGVKQDEFYKYLKNTLSKIAGSDYFLDKIEREDFLRKQRTFDNGSIPHQIHLQEMHAILRRQGDYYPFLKENQDRIEKILTFRIPYYVGPLARGKSDFAWLSRKSADKITPWNFDEIVDKESSVEAFINRMTNYDLYLPNQKVLPKHSLLYEKFTVYNELTKVKYKTEQGKTAFFDANMKQEIFDGVFKVYRKVTKDKLMDFLEKEFDEFRIVDLTGLDKENKAFNASYGTYHDLRKILDKDFLDNSKNEKILEDIVLTLTLFEDREMIRKRLKNYSDLLTKEQLKKLERRHYTGWGRLSAELIHGIRNKESRKTILDYLIDDGNSNRNFMQLINDDALSFKEEIAKAQVIGETDNLNQVVSDIAGSPAIKKGILQSLKIVDELVKIMGHQPENIVVEMARENQFTNQGRRNSQQRLKGLTDSIKEFGSQILKEHPVENSQLQNDRLFLYYLQNGRDMYTGEELDIDYLSQYDIDHIIPQAFIKDNSIDNRVLTSSKENRGKSDDVPSKDVVRKMKSYWSKLLSAKLITQRKFDNLTKGERGGLTDDDKAGFIKRQLVETRQITKHVARILDERFNTETDENNKKIRQVKIVTLKSNLVSNFRKEFELYKVREINDYHHAHDAYLNAVIGKALLGVYPQLEPEFVYGDYPHFHGHKENKATAKKFFYSNIMNFFKKDDVRTDKNGEIIWKKDEYISNIKKVLSYPQVNIVKKVEEQTGGFSKESILPKGDSDKLIPRKTKKFYWDTKKYGGFDSPIVAYSILVIADIEKGKSKKLKTVKALVGVTIMEKMTFERDPVAFLERKGYRNVQEENIIKLPKYSLFKLENGRKRLLASARELQKGNEIVLPNHLGTLLYHAKNIHKVDEPKHLDYVDKHKDEFKELLDVVSNFSKKYTLAEGNLEKIKELYAQNNGEDLKELASSFINLLTFTAIGAPATFKFFDKNIDRKRYTSTTEILNATLIHQSITGLYETRIDLSKLGGD

SEQ ID NO: 1231 - protein, 1345 aa, Streptococcus mutans; identical to SEQ ID NO: 1230

SEQ ID NO: 1232 - protein, 1345 aa, Streptococcus mutans
MKKPYSIGLDIGTNSVGWAVVTDDYKVPAKKMKVLGNTDKSHIKKNLLGALLFDSGNTAEDRRLKRTARRRYTRRRNRILYLQEIFSEEMGKVDDSFFHRLEDSFLVTEDKRGERHPIFGNLEEEVKYHENFPTIYHLRQYLADNPEKTDLRLVYLALAHIIKFGGHFLIEGKFDTRNNDVQRLFQEFLAVYDNTFENSSLQEQNVQVEEILTDKISKSAKKDRVLKLFPNEKSNGRFAEFLKLIVGNQADFKKHFELEEKAPLQFSKDIYEEELEVLLAQIGDNYAELFLSAKKLYDSILLSGILTVTDVSTKAPLSASMIQRYNEHQMDLAQLKQFIRQKLSDKYNEVFSDVSKDGYAGYIDGKTNQEAFYKYLKGLLNKIEGSGYFLDKIEREDFLRKQRTFDNGSIPHQIHLQEMRAIIRRQAEFYPFLADNQDRIEKILTFRIPYYVGPLARGKSDFAWLSRKSADKITPWNFDEIVDKESSVEAFINRMTNYDLYLPNQKVLPKHSLLYEKFTVYNELTKVKYKTEQGKTAFFDANMKQEIFDGVFKVYRKVTKDKLMDFLEKEFDEFRIVDLTGLDKENKAFNASYGTYHDLRKILDKDFLDNSKNEKILEDIVLTLTLFEDREMIRKRLKNYSDLLTKEQLKKLERRHYTGWGRLSAELIHGIRNKESRKTILDYLIDDGNSNRNFMQLINDDALSFKEEIAKAQVIGETDNLNQVVSDIAGSPAIKKGILQSLKIVDELVKIMGHQPENIVVEMARENQFTNQGRRNSQQRLKGLTDSIKEFGSQILKEHPVENSQLQNDRLFLYYLQNGRDMYTGEELDIDYLSQYDIDHIIPQAFIKDNSIDNRVLTSSKENRGKSDDVPSKNVVRKMKSYWSKLLSAKLITQRKFDNLTKAERGGLTDDDKAGFIKRQLVETRQITKHVARILDERFHTETDENNKKIRQVKIVTLKSNLVSNFRKEFELYKVREINDYHHAHDAYLNAVIGKALLGVYPQLEPEFVYGDYPHFHGHKENKATAKKFFYSNIMNFFKKDDVRTDKNGEIIWKKDEHISNIKKVLSYPQVNIVKKVEEQTGGFSKESILPKGNSDKLIPRKTKKFYWDTKKYGGFDSPIVAYSILVIADIEKGKSKKLKTVKALVGVTIMEKMTFERDPVAFLERKGYRNVQEENIIKLPKYSLFKLENGRKRLLASARELQKGNEIVLPNHLGTLLYHAKNIHKVDEPKHLDYVDKHKDEFKELLDVVSNFSKKYTLAEGNLEKIKELYAQNNGEDLKELASSFINLLTFTAIGAPATFKFFDKNIDRKRYTSTTEILNATLIHQSITGLYETRIDLSKLGGD

SEQ ID NO: 1233 - protein, 1345 aa, Streptococcus mutans; identical to SEQ ID NO: 1232

SEQ ID NO: 1234 - protein, 1345 aa, Streptococcus mutans
MKKPYSIGLDIGTNSVGWAVVTDDYKVPAKKMKVLGNTDKSHIKKNLLGALLFDSGNTAEDRRLKRTARRRYTRRRNRILYLQEIFSEEMGKVDDSFFHRLEDSFLVTEDKRGERHPIFGNLEEEVKYHENFPTIYHLRQYLADNPEKTDLRLVYLALAHIIKFRGHFLIEGKFDTRNNDVQRLFQEFLAVYDNTFENSSLQEQNVQVEEILTDKISKSAKKDRVLKLFPNEKSNGRFAEFLKLIVGNQADFKKHFELEEKAPLQFSKDIYEEELEVLLAQIGDNYAELFLSAKKLYDSILLSGILTVTDVSTKAPLSASMIQRYNEHQMDLAQLKQFIRQKLSDKYNEVFSDVSKDGYAGYIDGKTNQEAFYKYLKGLLNKIEGSGYFLDKIEREDFLRKQRTFDNGSIPHQIHLQEMRAIIRRQAEFYPFLADNQDRIEKILTFRIPYYVGPLARGKSDFAWLSRKSADKITPWNFDEIVDKESSVEAFINRMTNYDLYLPNQKVLPKHSLLYEKFTVYNELTKVKYKTEQGKTAFFDANMKQEIFDGVFKVYRKVTKDKLMDFLEKEFDEFRIVDLTGLDKENKAFNASYGTYHDLRKILDKDFLDNSKNEKILEDIVLTLTLFEDREMIRKRLKNYSDLLTKEQLKKLERRHYTGWGRLSAELIHGIRNKESRKTILDYLIDDGNSNRNFMQLINDDALSFKEEIAKAQVIGETDNLNQVVSDIAGSPAIKKGILQSLKIVDELVKIMGHQPENIVVEMARENQFTNQGRRNSQQRLKGLTDSIKEFGSQILKEHPVENSQLQNDRLFLYYLQNGRDMYTGEELDIDYLSQYDIDHIIPQAFIKDNSIDNRVLTSSKENRGKSDDVPSKNVVRKMKSYWSKLLSAKLITQRKFDNLTKAERGGLTDDDKAGFIKRQLVETRQITKHVARILDERFHTETDENNKKIRQVKIVTLKSNLVSNFRKEFELYKVREINDYHHAHDAYLNAVIGKALLGVYPQLEPEFVYGDYPHFHGHKENKATAKKFFYSNIMNFFKKDDVRTDKNGEIIWKKDEHISNIKKVLSYPQVNIVKKVEEQTGGFSKESILPKGNSDKLIPRKTKKFYWDTKKYGGFDSPIVAYSILVIADIEKGKSKKLKTVKALVGVTIMEKMTFERDPVAFLERKGYRNVQEENIIKLPKYSLFKLENGRKRLLASARELQKGNEIVLPNHLGTLLYHAKNIHKVDEPKHLDYVDKHKDEFKELLDVVSNFSKKYTLAEGNLEKIKELYAQNNGEDLKELASSFINLLTFTAIGAPATFKFFDKNIDRKRYTSTTEILNATLIHQSITGLYETRIDLSKLGGD

SEQ ID NO: 1235 - protein, 1345 aa, Streptococcus mutans
MKKPYSIGLDIGTNSVGWAVVTDDYKVPAKKMKVLGNTDKSHIKKNLLGALLFDSGNTAEDRRLKRTARRRYTRRRNRILYLQEIFSEEMGKVDDSFFHRLEDSFLVTEDKRGERHPIFGNLEEEVKYHENFPTIYHLRQYLADNPEKTDLRLVYLALAHIIKFRGHFLIEGKFDTRNNDVQRLFQEFLAVYDNTFENSSLQEQNVQVEEILTDKISKSAKKDRVLKLFPNEKSNGRFAEFLKLIVGNQADFKKHFELEEKAPLQFSKDIYEEELEVLLAQIGDNYAELFLSAKKLYDSILLSGILTVTDVSTKAPLSASMIQRYNEHQMDLAQLKQFIRQKLSDKYNEVFSDVSKDGYAGYIDGKTNQEAFYKYLKGLLNKIEGSGYFLDKIEREDFLRKQRTFDNGSIPHQIHLQEMRAIIRRQAEFYPFLADNQDRIEKILTFRIPYYVGPLARGKSDFAWLSRKSADKITPWNFDEIVDKESSVEAFINRMTNYDLYLPNQKVLPKHSLLYEKFTVYNELTKVKYKTEQGKTAFFDANMKQEIFDGVFKVYRKVTKDKLMDFLEKEFDEFRIVDLTGLDKENKAFNASYGTYHDLRKILDKDFLDNSKNEKILEDIVLTLTLFEDREMIRKRLKNYSDLLTKEQLKKLERRHYTGWGRLSAELIHGIRNKESRKTILDYLIDDGNSNRNFMQLINDDALSFKEEIAKAQVIGETDNLNQVVSDIAGSPAIKKGILQSLKIVDELVKIMGHQPENIVVEMARENQFTNQGRRNSQQRLKGLTDSIKEFGSQILKEHPVENSQLQNDRLFLYYLQNGRDMYTGEELDIDYLSQYDIDHIIPQAFIKDNSIDNRVLTSSKENRGKSDDVPSKDVVRKMKSYWSKLLSAKLITQRKFDNLTKAERGGLTDDDKAGFIKRQLVETRQITKHVARILDERFNTETDENNKKIRQVKIVTLKSNLVSNFRKEFELYKVREINDYHHAHDAYLNAVIGKALLGVYPQLEPEFVYGDYPHFHGHKENKATAKKFFYSNIMNFFKKDDVRTDKNGEIIWKKDEHISNIKKVLSYPQVNIVKKVEEQTGGFSKESILPKGNSYKLIPRKTKKFYWDTKKYGGFDSPIVAYSILVIADIEKGKSKKLKTVKALVGVTIMEKMTFERDPVAFLERKGYRNVQEENIIKLPKYSLFKLENGRKRLLASARELQKGNEIVLPNHLGTLLYHAKNIHKVDEPKHLDYVDKHKDEFKELLDVVSNFSKKYTLAEGNLEKIKELYAQNNGEDLKELASSFINLLTFTAIGAPAAFKFFDKNIDRKRYTSTTEILNATLIHQSITGLYETRIDLSKLGGD

SEQ ID NO: 1236 - protein, 1345 aa, Streptococcus mutans
MKKPYSIGLDIGTNSVGWAVVTDDYKVPAKKMKVLGNTDKSHIKKNLLGALLFDSGNTAEDRRLKRTARRRYTRRRNRILYLQEIFSEEMGKVDDSFFHRLEDSFLVTEDKRGERHPIFGNLEEEVKYHENFPTIYHLRQYLADNPEKTDLRLVYLALAHIIKFRGHFLIEGKFDTRNNDVQRLFQEFLAVYDNTFENSSLQEQNVQVEEILTDKISKSAKKDRVLKLFPNEKSNGRFAEFLKLIVGNQADFKKHFELEEKAPLQFSKDIYEEELEVLLAQIGDNYAELFLSAKKLYDSILLSGILTVTDVSTKAPLSASMIQRYNEHQMDLAQLKQFIRQKLSDKYNEVFSDVSKDGYAGYIDGKTNQEAFYKYLKGLLNKIEGSGYFLDKIEREDFLRKQRTFDNGSIPHQIHLQEMRAIIRRQAEFYPFLADNQDRIEKILTFRIPYYVGPLARGKSDFAWLSRKSADKITPWNFDEIVDKESSAEAFINRMTNYDLYLPNQKVLPKHSLLYEKFTVYNELTKVKYKTEQGKTAFFDANMKQEIFDGVFKVYRKVTKDKLMDFLEKEFDEFRIVDLTGLDKENKAFNASYGTYHDLRKILDKDFLDNSKNEKILEDIVLTLTLFEDREMIRKRLKNYSDLLTKEQLKKLERRHYTGWGRLSAELIHGIRNKESRKTILDYLIDDGNSNRNFMQLINDDALSFKEEIAKAQVIGETDNLNQVVSDIAGSLAIKKGILQSLKIVDELVKIMGHQPENIVVEMARENQFTNQGRRNSQQRLKGLTDSIKEFGSQILKEHPVENSQLQNDRLFLYYLQNGRDMYTGEELDIDYLSQYDIDHIIPQAFIKDNSIDNRVLTSSKENRGKSDDVPSKDVVRKMKSYWSKLLSAKLITQRKFDNLTKGERGGLTDDDKAGFIKRQLVETRQITKHVARILDERFNTETDENNKKIRQVKIVTLKSNLVSNFRKEFELYKVREINDYHHAHDAYLNAVIGKALLGVYPQLEPEFVYGDYPHFHGHKENKATAKKFFYSNIMNFFKKDDVRTDKNGEIIWKKDEYISNIKKVLSYPQVNIVKKVEEQTGGFFKESILPKGDSDKLIPRKTKKFYWDTKKYGGFDSPIVAYSILVIADIEKGKSKKLKTVKALVGVTIMEKMTFERDPVAFLERKGYRNVQEENIIKLPKYSLFKLENGRKRLLASARELQKGNEIVLPNHLGTLLYHAKNIHKVDEPKHLDYVDKHKDEFKELLDVVSNFSKKYTLAEGNLEKIKELYAQNNGEDLKELASSFINLLTFTAIGAPATFKFFDKNIDRKRYTSTTEILNATLIHQSITGLYETRIDLSKLGGD

SEQ ID NO: 1237 - protein, 1345 aa, Streptococcus mutans
MKKPYSIGLDIGTNSVGWAVVTDDYKVPAKKMKVLGNTDKSHIKKNLLGALLFDSGNTAEDRRLKRTARRRYTRRRNRILYLQEIFSEEMGKVDDSFFHRLEDSFLVTEDKRGERHPIFGNLEEEVKYHENFPTIYHLRQYLADNPEKTDLRLVYLALAHIIKFRGHFLIEGKFDTRNNDVQRLFQEFLAVYDNTFENSSLQEQNVQVEEILTDKISKSAKKDRVLKLFPNEKSNGRFAEFLKLIVGNQADFKKHFELEEKAPLQFSKDIYEEELEVLLAQIGDNYAELFLSAKKLYDSILLSGILTVTDVSTKAPLSASMIQRYNEHQMDLAQLKQFIRQKLSDKYNEVFSDVSKDGYAGYIDGKTNQEAFYKYLKGLLNKIEGSGYFLDKIEREDFLRKQRTFDNGSIPHQIHLQEMRAIIRRQAEFYPFLADNQDRIEKILTFRIPYYVGPLARGKSDFAWLSRKSADKITPWNFDEIVDKESSVEAFINRMTNYDLYLPNQKVLPKHSLLYEKFTVYNELTKVKYKTEQGKTAFFDANMKQEIFDGVFKVYRKVTKDKLMDFLEKEFDEFRIVDLTGLDKENKAFNASYGTYHDLRKILDKDFLDNSKNEKILEDIVLTLTLFEDREMIRKRLKNYSDLLTKEQLKKLERRHYTGWGRLSAELIHGIRNKESRKTILDYLIDDGNSNRNFMQLINDDALSFKEEIAKAQVIGETDNLNQVVSDIAGSPAIKKGILQSLKIVDELVKIMGHQPENIVVEMARENQFTNQGRRNSQQRLKGLTDSIKEFGSQILKEHPVENSQLQNDRLFLYYLQNGRDMYTGEELDIDYLSQYDIDHIIPQAFIKDNSIDNRVLTSSKENRGKSDDVPSKDVVRKMKSYWSKLLSAKLITQRKFDNLTKAERGGLTDDDKAGFIKRQLVETRQITKHVARILDERFNTETDENNKKIRQVKIVTLKSNLVSNFRKEFELYKVREINDYHHAHDAYLNAVIGKALLGVYPQLEPEFVYGDYPHFHGHKENKATAKKFFYSNIMNFFKKDDVRTDKNGEIIWKKDEHISNIKKVLSYPQVNIVKKVEEQTGGFSKESILPKGNSDKLIPRKTKKFYWDTKKYGGFDSPIVAYSILVIADIEKGKSKKLKTVKALVGVTIMEKMTFERDPVAFLERKGYRNVQEENIIKLPKYSLFKLENGRKRLLASARELQKGNEIVLPNHLGTLLYHAKNIHKVDEPKHLDYVDKHKDEFKELLDVVSNFSKKYTLAEGNLEKIKELYAQNNGEDLKELASSFINLLTFTAIGAPATFKFFDKNIDRKRYTSTTEILNATLIHQSITGLYETRIDLNKLGGD

SEQ ID NO: 1238 - protein, 1345 aa, Streptococcus mutans; identical to SEQ ID NO: 1237

SEQ ID NO: 1239 - protein, 1345 aa, Streptococcus mutans; identical to SEQ ID NO: 1234

SEQ ID NO: 1240 - protein, 1345 aa, Streptococcus mutans; identical to SEQ ID NO: 1235

SEQ ID NO: 1241 - protein, 1345 aa, Streptococcus mutans; identical to SEQ ID NO: 1236

SEQ ID NO: 1242 - protein, 1345 aa, Streptococcus mutans
MKKPYSIGLDIGTNSVGWAVVTDDYKVPAKKMKVLGNTDKSHIKKNLLGALLFDSGNTAEDRRLKRTARRRYTRRRNRILYLQEIFSEEMGKVDDSFFHRLEDSFLVTEDKRGERHPIFGNLEEEVKYHENFPTIYHLRQYLADNPEKVDLRLVYLALAHIIKFRGHFLIEGKFDTRNNDVQKLFQEFLAVYDNTFENSSLQEQNVQVEEILTDKISKSAKKDRVLKLFPNEKSNGRFAEFLKLIVGNQADFKKHFELEEKAPLQLSKDTYEEELEVLLAQIGDNYAELFLSAKKLYDSILLSGILTVTDVSTKAPLSASMIQRYNEHQMDLAQLKQFIRQKLSDKYNEVFSDVSKDGYAGYIDGKTNQEAFYKYLKGLLNKIEGSGYFLDKIEREDFLRKQRTFDNGSIPHQIHLQEMRAIIRRQAEFYPFLADNQDRIEKILTFRIPYYVGPLARGKSDFAWLSRKSADKITPWNFDEIVDKESSVEAFINRMTNYDLYLPNQKVLPKHSLLYEKFTVYNELTKVKYKTEQGKTAFFDANMKQEIFDGVFKVYRKVTKDKLMDFLEKEFDEFRIVDLTGLDKENKAFNASYGTYHDLRKILDKDFLDNSKNEKILEDIVLTLTLFEDREMIRKRLENYSDLLTKEQVKKLERRHYTGWGRLSAELIHGIRNKESRKTLLDYLIDDGNSNRNFMQLINDDALSFKEEIAKAQVIGETDNLNQVVSDIAGSPAIKKGILQSLKIVDELVKIMGHQPENIVVEMARENQFTNQGRRNSQQRLKGLTDSIKEFGSQILKEHPVENSQLQNDRLFLYYLQNGRDMYTGEELDIDYLSQYDIDHIIPQAFIKDNSIDNRVLTSSKENRGKSDDVPSKDVVRKMKSYWSKLLSAKLITQRKFDNLTKAERGGLTDDDKAGFIKRQLVETRQITKHVARILDERFNTETDENNKKIRQVKIVTLKSNLVSNFRKEFELYKVREINDYHHAHDAYLNAVIGKALLGVYPQLEPEFVYGDYPHFHGHKENKATAKKFFYSNIMNFFKKDDVRTDKNGEIIWKKDEYISNIKKVLSYPQVNIVKKVEEQTGGFSKESILPKGNSDKLIPRKTKKFYWDTKKYGGFDSPIVAYSILVIADIEKGKSKKLKTVKALVGVTIMEKMTFERDPIAFLERKGYRNVQEENIIKLPKYSLFKLENGRKRLLASARELQKGNEIVLPNHLGTLLYHAKNIHKVDEPKHLDYVDKHKDEFKELLDVVSNFSKKYTLAEGNLEKIKELYAQNNGEDLKELASSFINLLTFTAIGAPATFKFFDKNIDRKRYTSTTEILNATLIHQSITGLYETRIDLSKLGGD

SEQ ID NO: 1243 - protein, 1345 aa, Streptococcus mutans; identical to SEQ ID NO: 1242

SEQ ID NO: 1244 - protein, 1345 aa, Streptococcus mutans
MKKPYSIGLDIGTNSVGWAVVTDDYKVPAKKMKVLGNTDKSHIKKNLLGALLFDSGNTAEDRRLKRTARRRYTRRRNRILYLQEIFSEEMGKVDDSFFHRLEDSFLVTEDKRGERHPIFGNLEEEVKYHENFPTIYHLRQYLADNPEKVDLRLVYLALAHIIKFRGHFLIEGKFDTRNNDVQRLFQEFLAVYDNTFENSSLQEQNVQVEEILTDKISKSAKKDRVLKLFPNEKSNGRFAEFLKLIVGNQADFKKHFELEEKAPLQFSKDTYEEDLEELLGKIGDDYADLFTLAKNLYDAILLSGILTADDSSTKAPLSASMIQRYNEHQMDLAQLKQFIRQKLSDKYNEVFSDVSKDGYAGYIDGKTNQEAFYKYLKGLLNKIEGSGYFLDKIEREDFLRKQRTFDNGSIPHQIHLQEMRAIIRRQAEFYPFLADNQDRIEKILTFRIPYYVGPLARGKSDFAWLSRKSADKITPWNFDEIVDKESSAEAFINRMTNYDLYLPNQKVLPKHSLLYEKFTVYNELTKVKYKTEQGKTAFFDANMKQEIFDGVFKVYRKVTKDKLMDFLEKEFDEFRIVDLTGLDKENKVFNASYGTYHDLCKILDKDFLDNSKNEKILEDIVLTLTLFEDREMIRKRLENYSDLLTKEQVKKLERRHYTGWGRLSAELIHGIRNKESRKTILDYLIDDGNSNRNFMQLINDDALSFKEEIAKAQVIGETDNLNQVVSDIAGSPAIKKGILQSLKIVDELVKIMGHQPENIVVEMARENQFTNQGRRNSQQRLKGLTDSIKEFGSQILKEHPVENSQLQNDRLFLYYLQNGRDMYTGEELDIDYLSQYDIDHIIPQAFIKDNSIDNRVLTSSKENRGKSDDVPSKDVVRKMKSYWSKLLSAKLITQRKFDNLTKAERGGLTDDDKAGFIKRQLVETRQITKHVARILDERFYTETDENNKKIRQVKIVTLKSNLVSNFRKEFELYKVREINDYHHAHDAYLNAVIGKALLGVYPQLEPEFVYGDYPHFHGHKENKATAKKFFYSNIMNFFKKDDVRTDKNGEIIWKKDEHISNIKKVLSYPQVNIVKKVEEQTGGFSKESILPKGNSDKLIPRKTKKFYWDTKKYGGFDSPIVAYSILVIADIEKGKSKKLKTVKALVGVTIMEKMTFERDPVAFLERKGYRNVQEENIIKLPKYSLFKLENGRKRLLASARELQKGNEIVLPNHLGTLLYHAKNIHKVDEPKHLDYVDKHKDEFKELLDVVSNFSKKYTLAEGNLEKIKELYAQNNGEDLKELASSFINLLTFTAIGAPATFKFFDKNIDRKRYTSTTEILNATLIHQSITGLYETRIDLSKLGGD

SEQ ID NO: 1245 - protein, 1345 aa, Streptococcus mutans
MKKPYSIGLDIGTNSVGWAVVTDDYKVPAKKMKVLGNTDKSHIKKNLLGALLFDSGNTAEDRRLKRTARRRYTRRRNRILYLQEIFSEEMGKVDDSFFHRLEDSFLVTEDKRGERHPIFGNLEEEVKYHENFPTIYHLRQYLADNPEKVDLRLVYLALAHIIKFRGHFLIEGKFDTRNNDVQRLFQEFLAVYDNTFENSSLQEQNVQVEEILTDKISKSAKKDRVLKLFPNEKSNGRFAEFLKLIVGNQADFKKHFELEEKAPLQFSKDTYEEDLEELLGKIGDDYADLFTLAKNLYDAILLSGILTADDSSTKAPLSASMIQRYNEHQMDLAQLKQFIRQKLSDKYNEVFSDVSKDGYAGYIDGKTNQEAFYKYLKGLLNKIEGSGYFLDKIEREDFLRKQRTFDNGSIPHQIHLQEMRAIIRRQAEFYPFLADNQDRIEKILTFRIPYYVGPLARGKSDFAWLSRKSADKITPWNFDEIVDKESSAEAFINRMTNYDLYLPNQKVLPKHSLLYEKFTVYNELTKVKYKTEQGKTAFFDANMKQEIFDGVFKVYRKVTKDKLMDFLEKEFDEFRIVDLTGLDKENKVFNASYGTYHDLCKILDKDFLDNSKNEKILEDIVLTLTLFEDREMIRKRLENYSDLLTKEQVKKLERRHYTGWGRLSAELIHGIRNKESRKTILDYLIDDGNSNRNFMQLINDDALSFKEEIAKAQVIGETDNLNQVVSDIAGSPAIKKGILQSLKIVDELVKIMGHQPENIVVEMARENQFTNQGRRNSQQRLKGLTDSIKEFGSQILKEHPVENSQLQNDRLFLYYLQNGRDMYTGEELDIDYLSQYDIDHIIPQAFIKDNSIDNRVLTSSKENRGKSDDVPSKDVVRKMKPYWSKLLSAKLITQRKFDNLTKAERGGLTDDDKAGFIKRQLVETRQITKHVARILDERFNTETDENNKKIRQVKIVTLKSNLVSNFRKEFELYKVREINDYHHAHDAYLNAVIGKALLGVYPQLEPEFVYGDYPHFHGHEENKATAKKFFYSNIMNFFKKDDVRTDKNGEIIWKKDEHISNIKKVLSYPQVNIVKKVEEQTGGFSKESILPKGNSDKLIPRKTKKFYWDTKKYGGFDSPIVAYSILVIADIEKGKSKKLKTVKALVGVTIMEKMTFERDPVAFLERKGYRNVQEENIIKLPKYSLFKLENGRKRLLASARELQKGNEIVLPNHLGTLLYHAKNIHKVDEPKHLDYVDKHKDEFKELLDVVSNFSKKYTLAEGNLEKIKELYAQNNGEDLKELASSFINLLTFTAIGAPATFKFFDKNIDRKRYTSTTEILNATLIHQSITGLYETRIDLSKLGGD

SEQ ID NO: 1246 - protein, 1345 aa, Streptococcus mutans
MKKPYSIGLDIGTNSVGWAVVTDDYKVPAKKMKVLGNTDKSHIKKNLLGALLFDSGNTAEDRRLKRTARRRYTRRRNRILYLQEIFSEEMGKVDDSFFHRLEDSFLVTEDKRGERHPIFGNLEEEVKYHENFPTIYHLRQYLADNPEKVDLRLVYLALAHIIKFRGHFLIEGKFDTRNNDVQRLFQEFLAVYDNTFENSSLQEQNVQVEEILTDKISKSAKKDRVLKLFPNEKSNGRFAEFLKLIVGNQADFKKHFELEEKAPLQFSKDTYEEELEVLLAQIGDNYAELFLSAKKLYDSILLSGILTVTDVSTKAPLSASMIQRYNEHQMDLAQLKQFIRQKLSDKYNEVFSDVSKDGYAGYIDGKTNQEAFYKYLKGLLNKIEGSGYFLDKIEREDFLRKQRTFDNGSIPHQIHLQEMRAIIRRQAEFYPFLADNQDRIEKILTFRIPYYVGPLARGKSDFAWLSRKSADKITPWNFDEIVDKESSAEAFINRMTNYDLYLPNQKVLPKHSLLYEKFTVYNELTKVKYKTEQGKTAFFDANMKQEIFDGVFKVYRKVTKDKLMDFLEKEFDEFRIVDLTGLDKENKVFNASYGTYHDLCKILDKDFLDNSKNEKILEDIVLTLTLFEDREMIRKRLENYSDLLTKEQVKKLERRHYTGWGRLSAELIHGIRNKESRKTILDYLIDDGNSNRNFMQLINDDALSFKEEIAKAQVIGETDNLNQVVSDIAGSPAIKKGILQSLKIVDELVKIMGHQPENIVVEMARENQFTKQGRRNSQQRLKGLTDSIKEFGSQILKEHPVENSQLQNDRLFLYYLQNGRDMYTGEELDIDYLSQYDIDHIIPQAFIKDNSIDNRVLTSSKENRGKSDDVPSKDVVRKMKSYWSKLLSAKLITQRKFDNLTKAERGGLTDDDKAGFIKRQLVETRQITKHVARILDERFYTETDENNKKIRQVKIVTLKSNLVSNFRKEFELYKVREINDYHHAHDAYLNAVIGKALLGVYPQLEPEFVYGDYPHFHGHKENKATAKKFFYSNIMNFFKKDDVRTDKNGEIIWKKDEHISNIKKVLSYPQVNIVKKVEEQTGGFSKESILPKGNSDKLIPRKTKKFYWDTKKYGGFDSPIVAYSILVIADIEKGKSKKLKTVKALVGVTIMEKMTFERDPVAFLERKGYRNVQEENIIKLPKYSLFKLENGRKRLLASARELQKGNEIVLPNHLGTLLYHAKNIHKVDEPKHLDYVDKHKDEFKELLDVVSNFSKKYTLAEGNLEKIKELYAQNNGEDLKELASSFINLLTFTAIGAPATFKFFDKNIDRKRYTSTTEILNATLIHQSITGLYETRIDLSKLGGD

SEQ ID NO: 1247 - protein, 1345 aa, Streptococcus mutans
MKKPYSIGLDIGTNSVGWAVVTDDYKVPAKKMKVLGNTDKSHIKKNLLGALLFDSGNTAEDRRLKRTARRRYTRRRNRILYLQEIFSEEMGKVDDSFFHRLEDSFLVTEDKRGERHPIFGNLEEEVKYHENFPTIYHLRQYLADNPEKVDLRLVYLALAHIIKFRGHFLIEGKFDTRNNDVQRLFQEFLAVYDNTFENSSLQEQNVQVEEILTDKISKSAKKDRVLKLFPNEKSNGRFAEFLKLIVGNQADFKKHFELEEKAPLQFSKDTYEEELEVLLAQIGDNYAELFLSAKKLYDSILLSGILTVTDVSTKAPLSASMIQRYNEHQMDLAQLKQFIRQKLSDKYNEVFSDVSKDGYAGYIDGKTNQEAFYKYLKGLLNKIEGSGYFLDKIEREDFLRKQRTFDNGSIPHQIHLQEMRAIIRRQAEFYPFLADNQDRIEKILTFRIPYYVGPLARGKSDFAWLSRKSADKITPWNFDEIVDKESSAEAFINRMTNYDLYLPNQKVLPKHSLLYEKFTVYNELTKVKYKTEQGKTAFFDANMKQEIFDGVFKVYRKVTKDKLMDFLEKEFDEFRIVDLTGLDKENKVFNASYGTYHDLCKILDKDFLDNSKNEKILEDIVLTLTLFEDREMIRKRLENYSDLLTKEQVKKLERRHYTGWGRLSAELIHGIRNKESRKTILDYLIDDGNSNRNFMQLINDDALSFKEEIAKAQVIGETDNLNQVVSDIAGSPAIKKGILQSLKIVDELVKIMGHQPENIVVEMARENQFTKQGRRNSQQRLKGLTDSIKEFGSQILKEHPVENSQLQNDRLFLYYLQNGRDMYTGEELDIDYLSQYDIDHIIPQAFIKDNSIDNRVLTSSKENRGKSDDVPSKDVVRKMKSYWSKLLSAKLITQRKFDNLTKAERGGLTDDDKAGFIKRQLVETRQITKHVARILDERFYTETDENNKKIRQVKIVTLKSNLVSNFRKEFELYKVREINDYHHAHDAYLNAVIGKALLGVYPQLEPEFVYGDYPHFHGHKENKATAKKFFYSNIMNFFKKDDVRTDRNGEIIWKKDEHISNIKKVLSYPQVNIVKKVEEQTGGFSKESILPKGNSDKLIPRKTKKFYWDTKKYGGFDSPIVAYSILVIADIEKGKSKKLKTVKALVGVTIMEKMTFERDPVAFLERKGYRNVQEENIIKLPKYSLFKLENGRKRLLASARELQKGNEIVLPNHLGTLLYHAKNIHKVDEPKHLDYVDKHKDEFKELLDVVSNFSKKYTLAEGNLEKIKELYAQNNGEDLKELASSFINLLTFTAIGAPATFKFFDKNIDRKRYTSTTEILNATLIHQSITGLYETRIDLSKLGGD

SEQ ID NO: 1248 - protein, 1345 aa, Streptococcus mutans
MKKPYSIGLDIGTNSVGWAVVTDDYKVPAKKMKVLGNTDKSHIKKNLLGALLFDSGNTAEDRRLKRTARRRYTRRRNRILYLQEIFSEEMGKVDDSFFHRLEDSFLVTEDKRGERHPIFGNLEEEVKYHENFPTIYHLRQYLADNPEKVDLRLVYLALAHIIKFRGHFLIEGKFDTRNNDVQRLFQEFLAVYDNTFENSSLQEQNVQVEEILTDKISKSAKKDRVLKLFPNEKSNGRFAEFLKLIVGNQADFKKHFELEEKAPLQFSKDTYEEELEVLLAQIGDNYAELFLSAKKLYDSILLSGILTVTDVSTKAPLSASMIQRYNEHQMDLAQLKQFIRQKLSDKYNEVFSDVSKDGYAGYIDGKTNQEAFYKYLKGLLNKIEGSGYFLDKIEREDFLRKQRTFDNGSIPHQIHLQEMRAIIRRQAEFYPFLADNQDRIEKILTFRIPYYVGPLARGKSDFAWLSRKSADKITPWNFDEIVDKESSAEAFINRMTNYDLYLPNQKVLPKHSLLYEKFTVYNELTKVKYKTEQGKTAFFDANMKQEIFDGVFKVYRKVTKDKLMDFLEKEFDEFRIVDLTGLDKENKVFNASYGTYHDLCKILDKDFLDNSKNEKILEDIVLTLTLFEDREMIRKRLENYSDLLTKEQVKKLERRHYTGWGRLSAELIHGIRNKESRKTILDYLIDDGNSNRNFMQLINDDALSFKEEIAKAQVIGETDNLNQVVSDIAGSPAIKKGILQSLKIVDELVKIMGHQPENIVVEMARENQFTNQGRQNSQQRLKGLTDSIKEFGSQILKEHPVENSQLQNDRLFLYYLQNGRDMYTGEELDIDYLSQYDIDHIIPQAFIKDNSIDNRVLTSSKENRGKSDDVPSEDVVRKMKSYWSKLLSAKLITQRKFDNLTKAERGGLTDDDKAGFIKRQLVETRQITKHVARILDERFYTETDENNKKIRQVKIVTLKSNLVSNFRKEFELYKVREINDYHHAHDAYLNAVIGKALLGVYPQLEPEFVYGDYPHFHGHKENKATAKKFFYSNIMNFFKKDDVRTDKNGEIIWKKDEHISNIKKVLSYPQVNIVKKVEEQTGGFSKESILPKGNSDKLIPRKTKKFYWDTKKYGGFDSPIVAYSILVIADIEKGKSKKLKTVKALVGVTIMEKMTFERDPVAFLERKGYRNVQEENIIKLPKYSLFKLENGRKRLLASARELQKGNEIVLPNHLGTLLYHAKNIHKVDEPKHLDYVDKHKDEFKELLDVVSNFSKKYTLAEGNLEKIKELYAQNNGEDLKELASSFINLLTFTAIGAPATFKFFDKNIDRKRYTSTTEILNATLIHQSITGLYETRIDLSKLGGD

SEQ ID NO: 1249 - protein, 1345 aa, Streptococcus mutans; identical to SEQ ID NO: 1248

SEQ ID NO: 1250 - protein, 1345 aa, Streptococcus mutans; identical to SEQ ID NO: 1244

SEQ ID NO: 1251 - protein, 1345 aa, Streptococcus mutans; identical to SEQ ID NO: 1245

SEQ ID NO: 1252 - protein, 1345 aa, Streptococcus mutans; identical to SEQ ID NO: 1246

SEQ ID NO: 1253 - protein, 1345 aa, Streptococcus mutans; identical to SEQ ID NO: 1247

SEQ ID NO: 1254 - protein, 1345 aa, Streptococcus mutans; identical to SEQ ID NO: 1246

SEQ ID NO: 1255 - protein, 1345 aa, Streptococcus mutans; identical to SEQ ID NO: 1246

SEQ ID NO: 1256 - protein, 1345 aa, Streptococcus mutans; identical to SEQ ID NO: 1246

SEQ ID NO: 1257 - protein, 1345 aa, Streptococcus mutans; identical to SEQ ID NO: 1247

SEQ ID NO: 1258 - protein, 1345 aa, Streptococcus mutans
MKKPYSIGLDIGTNSVGWAVVTDDYKVPAKKMKVLGNTDKSHIKKNLLGALLFDSGNTAEDRRLKRTARRRYTRRRNRILYLQEIFSEEMGKVNDSFFHRLEDSFLVTEDKRGERHPIFGNLEEEVKYHENFPTIYHLRQYLADNPEKVDLRLVYLALAHIIKFRGHFLIEGKFDTRNNDVQRLFQEFLAVYDNTFENSSLQEQNVQVEEILTDKISKSAKKDRVLKLFPNEKSNGRFAEFLKLIVGNQADFKKHFELEEKAPLQFSKDTYEEELEVLLAQIGDNYAELFLSAKKLYDSILLSGILTVTDVSTKAPLSASMIQRYNEHQMDLAQLKQFIRQKLSDKYNEVFSDVSKDGYAGYIDGKTNQEAFYKYLKGLLNKIEGSGYFLDKIEREDFLRKQRTFDNGSIPHQIHLQEMRAIIRRQAEFYPFLADNQDRIEKILTFRIPYYVGPLARGKSDFAWLSRKSADKITPWNFDEIVDKESSAEAFINRMTNYDLYLPNQKVLPKHSLLYEKFTVYNELTKVKYKTEQGKTAFFDANMKQEIFDGVFKVYRKVTKDKLMDFLEKEFDEFRIVDLTGLDKENKVFNASYGTYHDLCKILDKDFLDNSKNEKILEDIVLTLTLFEDREMIRKRLENYSDLLTKEQVKKLERRHYTGWGRLSAELIHGIRNKESRKTILDYLIDDGNSNRNFMQLINDDALSFKEEIAKAQVIGETDNLNQVVSDIAGSPAIKKGILQSLKIVDELVKIMGHQPENIVVEMARENQFTKQGRRNSQQRLKGLTDSIKEFGSQILKEHPVENSQLQNDRLFLYYLQNGRDMYTGEELDIDYLSQYDIDHIIPQAFIKDNSIDNRVLTSSKENRGKSDDVPSKDVVRKMKSYWSKLLSAKLITQRKFDNLTKAERGGLTDDDKAGFIKRQLVETRQITKHVARILDERFYTETDENNKKIRQVKIVTLKSNLVSNFRKEFELYKVREINDYHHAHDAYLNAVIGKALLGVYPQLEPEFVYGDYPHFHGHKENKATAKKFFYSNIMNFFKKDDVRTDKNGEIIWKKDEYISNIKKVLSYPQVNIVKKVEEQTGGFSKESILPKGNSDKLIPRKTKKFYWDTKKYGGFDSPIVAYSILVIADIEKGKSKKLKTVKALVGVTIMEKMTFERDPIAFLERKGYRNVQEENIIKLPKYSLFKLENGRKRLLASARELQKGNEIVLPNHLGTLLYHAKNIHKVDEPKHLDYVDKHKDEFKELLDVVSNFSKKYTLAEGNLEKIKELYAQNNGEDLKELASSFINLLTFTAIGAPAAFKFFDKNIDRKRYTSTTEILNATLIHQSITGLYETRIDLSKLGGD

SEQ ID NO: 1259 - protein, 1345 aa, Streptococcus mutans; identical to SEQ ID NO: 1258

SEQ ID NO: 1260 - protein, 1345 aa, Streptococcus mutans
MKKPYSIGLDIGTNSVGWAVVTDDYKVPAKKMKVLGNTDKSHIKKNLLGALLFDSGNTAEDRRLKRTTRRRYTRRRNRILYLQEIFSEEMGKVDDSFFHRLEDSFLVTEDKRGERHPIFGNLEEEVKYHENFPTIYHLRQYLADNPEKTDLRLVYLALAHIIKFRGHFLIEGKFDTRNNDVQRLFQEFLAVYDNTFENSSLQEQNVQVEEILTDKISKSAKKDRVLKLFPNEKSNGCFAEFLKLIVGNQADFKKHFELEEKAPLQFSKDTYEEELEVLLAQIGDNYAELFLSAKKLYDSILLSGILTVTDVSTKAPLSASMIQRYNEHQMDLTQLKQFIRQKLSDKYNEVFSDVSKDGYAGYIDGKTNQEAFYKYLKGLLNKIEGSGYFLDKIEREDFLRKQRTFDNGSIPHQIHLQEMRAIIRRQAEFYPFLADNQDRIEKLLTFRIPYYVGPLASGKSDFAWLSRKSADKITPWNFDEIVDKESSAEAFINRMTNYDLYLPNQKVLPKHSLLYEKFTVYNELTKVKYKTEQGKTAFFDANMKQEIFDGVFKVYRKVTKDKLMDFLEKEFDEFRIVDLTGLDKENKVFNASYGTYHDLCKILDKDFLDNSKNEKILEDIVLTLTLFEDREMIRKRLENYSDLLTKEQVKKLERRHYTGWGRLSAELIHGIRNKESRKTILDYLIDDGNSNRNFMQLINDDALSFKEEIAKAQVIGETDNLNQVVSDIAGSPAIKKGILQSLKIVDELVKIMGHQPENIVVEMARENQFTNQGRRNSQQRLKGLTDSIKEFGSQILKEHPVENSQLQNDRLFLYYLQNGRDMYTGEELDIDYLSQYDIDHIIPQAFIKDNSIDNRVLTSSKENRGKSDDVPSKDVVRKMKSYWSKLLSAKLITQRKFDNLTKAERGGLTDDDKAGFIKRQLVETRQITKHVARILDERFNTETDENNKKIRQVKIVTLKSNLVSNFRKEFELYKVREINDYHHAHDAYLNAVIGKALLGVYPQLEPEFVYGDYPHFHGHKENKATAKKFFYSNIMNFFKKDDVRTDKNGEIIWKKDEHISNIKKVLSYPQVNIVKKVEEQTGGFSKESILPKGNSDKLIPRKTKKFYWDTKKYGGFDSPIVAYSILVIADIEKGKSKKLKTVKALVGVTIMEKMTFERDPVAFLERKGYRNVQEENIIKLPKYSLFKLENGRKRLLASARELQKGNEIVLPNHLGTLLYHAKNIHKVDEPKHLDYVDKHKDEFKELLDVVSNFSKKYTLAEGNLEKIKELYAQNNGEDLKELASSFINLLTFTAIGAPATFKFFDKNIDRKRYTSTTEILNATLIHQSITGLYETRIDLSKLGGD

SEQ ID NO: 1261 - protein, 1345 aa, Streptococcus mutans; identical to SEQ ID NO: 1260

SEQ ID NO: 1262 - protein, 1350 aa, Streptococcus mutans
MKKPYSIGLDIGTNSVGWAVVTDDYKVPAKKMTVLGNTDKSHIKKNLLGALLFDSGNTAADRRLKRTARRRYTRRRNRILYLQEIFAEEMSKVDDSFFHRLEDSFLVTEDKRGERHPIFGNLEEEVKYHENFPTIYHLRQYLADNPEKVDLRLVYLALAHIIKFRGHFLIEGKFDTRNNDVQRLFQEFLAVYDNTFENSSLQEQNVQVEEILTDKISKSAKKDRVLKLFPNEKSNGRFAEFLKLIVGNQADFKKHFELEEKTPLQFSKDTYEEELEVLLAQIGDNYAELFLSAKKLYDSILLSGILTVTDVSTKAPLSASMIQRYNEHQMDLAQLKQFIRQKLSDKYNEVFSDVSKDGYAGYIDGKTNQEAFYKYLKGLLNKIEGSGYFLDKIEREDFLRKQRTFDNGSIPHQIHLQEMRAIIRRQAEFYPFLADNQDRIEKILTFRIPYYVGPLARGKSDFAWLSRKSADKITPWNFDEIVDKESSAEAFINRMTNYDLYLPNQKVLPKHSLLYEKFTVYNELTKVKYKTEQGKTAFFDANMKQEIFDGVFKVYRKVTKDKLMDFLEKEFDEFRIVDLTGLDKENKAFNASYGTYHDLRKILDKDFLDNSKNEKILEDIVLTLTLFEDREMIRKRLENYSDLLTKEQVKKLERRHYTGWGRLSAELIHGIRNKESRKTILDYLIDDGNSNRNFMQLINDDALSFKEEIAKAQVIGETDNLNQVVSDIAGSPAIKKGILQSLKIVDELVKIMGHQPENIVVEMARENQFTNQGRRNSQQRLKGLTDSIKEFGSQILKEHPVENSQLQNDRLFLYYLQNGRDMYTGEELDIDYLSQYDIDHIIPQAFIKDNSIDNRVLTSSKENRGKSDDVPSEDVVNRMRPFWNKLLSSGLISQRKYNNLTKKELTPDDKAGFIKRQLVETRQITKHVARMLDERFNKEFDDNNKRIRRVKIVTLKSNLVSSFRKEFELYKVREINDYHHAHDAYLNAVVVKALLVKYPKLEPEFVYGEYPKYNSYRERKTATQKMFFYSNIMNMFKSKVKLADDQIVERPMIEVNDETGEIAWDKTKHITTVKKVLSYPQVNIVKKVEEQTIGQNGGLFDDNPKSPLEVIPSKLVPLKKALNPEKYGGYQKPTTAYPILLIVDTKQLIPISVMDKKRFEQNPVKFLKDKGYQQIEKNNFVKLPKYTLVDIGNGIKRLWASSKEVHKGNQLVVSKKSQDLLYHAHHLDNDYSNEYVKNHYQQFDILFNEITSFSKKCKLGKEHIQKIEEAYSKERDSASIEELADGFIKLLGFTQLGATSPFSFLGIKLNQKQYTGKKDYLLPCMEATLIHQSITGLYETRIDLSKLGGD

SEQ ID NO: 1263 - protein, 1350 aa, Streptococcus mutans; identical to SEQ ID NO: 1262

SEQ ID NO: 1264 - protein, 1345 aa, Streptococcus mutans
MKKPYSIGLDIGTNSVGWAVVTDDYKVPDKKMKVLGNTDKSHIKKNLLGALLFDSGNTAEDRRLKRTARRRYTRRRNRILYLQEIFSEEMGKVDDSFFHRLEDSFLVTEDKRGERHPIFGNLEEEVKYHENFPTIYHLRQYLADNPEKTDLRLVYLALAHIIKFRGHFLIEGKFDTRNNDVQRLFQEFLAVYDNTFENSSLQEQNVQVEEILTDKISKSAKKDRVLKLFPNEKSNGRFAEFLKLIVGNQADFKKHFELEEKAPLQFSKDIYEEELEVLLAQIGDNYAELFLSAKKLYDSILLSGILTVTDVSTKAPLSASMIQRYNEHQMDLAQLKQFIRQKLSDKYNEVFSDVSKDGYAGYIDGKTNQEAFYKYLKGLLNKIEGSGYFLDKIEREDFLRKQRTFDNGSIPHQIHLQEMRAIIRRQAEFYPFLADNQDRIEKILTFRIPYYVGPLARGKSDFAWLSRKSADKITPWNFDEIVDKESSVEAFINRMTNYDLYLPNQKVLPKHSLLYEKFTVYNELTKVKYKTEQGKTAFFDANMKQEIFDGVFKVYRKVTKDKLMDFLEKEFDEFRIVDLTGLDKENKAFNASYGTYHDLRKILDKDFLDNSKNEKILEDIVLTLTLFEDREMIRKRLKNYSDLLTKEQLKKLERRHYTGWGRLSAELIHGIRNKESRKTILDYLIDDGNSNRNFMQLINDDALSFKEEIAKAQVIGETDNLNQVVSDIAGSPAIKKGILQSLKIVDELVKIMGHQPENIVVEMARENQFTNQGRRNSQQRLKGLTDSIKEFGSQILKEHPVENSQLQNDRLFLYYLQNGRDMYTGEELDIDYLSQYDIDHIIPQAFIKDNSIDNRVLTSSKENRGKSDDVPSKDVVRKMKSYWSKLLSAKLITQRKFDNLTKAERGGLTDDDKAGFIKRQLVETRQITKHVARILDERFYTETDENNKKIRQVKIVTLKSNLVSNFRKEFELYKVREINDYHHAHDAYLNAVIGKALLGVYPQLEPEFVYGDYPHFHGHKENKATAKKFFYSNIMNFFKKDDVRTDKNGEIIWKKDEHISNIKKVLSYPQVNIVKKVEEQTGGFSKESILPKGNSDKLIPRKTKKFYWDTKKYGGFDSPIVAYSILVIADIEKGKSKKLKTVKALVGVTIMEKMTFERDPVAFLERKGYRNVQEENIIKLPKYSLFKLENGRKRLLASARELQKGNEIVLPNHLGTLLYHAKNIHKVDEPKHLDYVDKHKDEFKELLDVVSNFSKKYTLAEGNLEKIKELYAQNNGEDLKELASSFINLLTFTAIGAPATFKFFDKNIDRKRYTSTTEILNATLIHQSITGLYETRIDLSKLGGD

SEQ ID NO: 1265 - protein, 1345 aa, Streptococcus mutans
MKKPYSIGLDIGTNSVGWAVVTDDYKVSAKKMKVLGNTDKSHIKKNLLGALLFDSGNTAEDRRLKRTARRRYTRRRNRILYLQEIFAEEMSKVDDSFFHRLEDSFLVTEDKRGERHPIFGNLEEEVKYHENFPTIYHLRQYLADNPEKVDLRLVYLALAHIIKFRGHFLIEGKFDTRNNDVQRLFQEFLAVYDNTFENSSLQEQNVQVEEILTDKISKSAKKDRVLKLFPNEKSNGRFAEFLKLIVGNQADFKKHFELEEKAPLQFSKDTYEEELEVLLAQIGDNYAELFLSAKKLYDSILLSGILTVTDVSTKAPLSASMIQRYNEHQMDLAQLKQFIRQKLSDKYNEVFSDVSKDGYAGYIDGKTNQEAFYKYLKGLLNKIEGSGYFLDKIEREDFLRKQRTFDNGSIPHQIHLQEMRAIIRRQAEFYPFLADNQDRIEKILTFRIPYYVGPLARGKSDFAWLSRKSADKITPWNFDEIVDKESSAEAFINRMTNYDLYLPNQKVLPKHSLLYEKFTVYNELTKVKYKTEQGKTAFFDANMKQEIFDGVFKVYRKVTKDKLMDFLEKEFDEFRIVDLTGLDKENKAFNASYGTYHDLRKILDKDFLDNSKNEKILEDIVLTLTLFEDREMIRKRLENYSDLLTKEQVKKLERRHYTGWGRLSAELIHGIRNKESRKTILDYLIDDGNSNRNFMQLINDDALSFKEEIAKAQVIGETDNLNQVVSDIAGSPAIKKGILQSLKIVDELVKIMGHQPENIVVEMARENQFTNQGRRNSQQRLKGLTDSIKEFGSQILKEHPVEHSQLQNDRLFLYYLQNGRDMYTGEELDIDYLSQYDIDHIIPQAFIKDNSIDNRVLTSSKENRGKSDDVPSKNVVRKMKSYWSKLLSAKLITQRKFDNLTKAERGGLTDDDKAGFIKRQLVETRQITKHVARILDERFHTETDENNKKIRQVKIVTLKSNLVSNFRKEFELYKVREINDYHHTHDAYLNAVIGKALLGVYPQLEPEFVYGDYPHFHGHKENKATAKKFFYSNIMNFFKKDDVRTDKNGEIIWKKDEHISNIKKVLSYPQVNIVKKVEEQTGGFSKESILPKGNSDKLIPRKTKKFYWDTKKYGGFDSPIVAYSILVIADIEKGKSKKLKTVKALVGVTIMEKMTFERDPVAFLERKGYRNVQEENIIKLPKYSLFKLENGRKRLLASARELQKGNEIVLPNHLGTLLYHAKNIHKVDEPKHLDYVDKHKDEFKELLDVVSNFSKKYTLAEGNLEKIKELYAQNNGEDLKELASSFINLLTFTAIGAPATFKFFDKNIDRKRYTSTTEILNATLIHQSITGLYETRIDLSKLGGD

SEQ ID NO: 1266 - protein, 1345 aa, Streptococcus mutans; identical to SEQ ID NO: 1265

SEQ ID NO: 1267 - protein, 1345 aa, Streptococcus mutans
MKKPYSIGLDIGTNSVGWSVVTDDYKVPAKKMKVLGNTDKSHIEKNLLGALLFDSGNTAEDRRLKRTARRRYTRRRNRILYLQEIFSEEMGKVDDSFFHRLEDSFLVTEDKRGERHPIFGNLEEEVKYHENFPTIYHLRQYLADNPEKVDLRLVYLALAHIIKFRGHFLIEGKFDTRNNDVQRLFQEFLAVYDNTFENSSLQEQNVQVEEILTDKISKSAKKDRVLKLFPNEKSNGRFAEFLKLIVGNQADFKKHFELEEKAPLQFSKDTYEEELEVLLAQIGDNYAELFLSAKKLYDSILLSGILTVTDVGTKAPLSASMIQRYNEHQMDLAQLKQFIRQKLSDKYNEVFSDVSKDGYAGYIDGKTNQEAFYKYLKGLLNKIEGSGYFLDKIEREDFLRKQRTFDNGSIPHQIHLQEMRAIIRRQAEFYPFLADNQDRIEKLLTFRIPYYVGPLARGKSDFAWLSRKSADKITPWNFDEIVDKESSAEAFINRMTNYDLYLPNQKVLPKHSLLYEKFTVYNELTKVKYKTEQGKTAFFDANMKQEIFDGVFKVYRKVTKDKLMDFLEKEFDEFRIVDLTGLDKENKVFNASYGTYHDLCKILDKDFLDNSKNEKILEDIVLTLTLFEDREMIRKRLENYSDLLTKEQVKKLERRHYTGWGRLSAELIHGIRNKESRKTILDYLIDDGNSNRNFMQLINDDALSFKEEIAKAQVIGETDNLNQVVSDIAGSPAIKKGILQSLKIVDELVKIMGHQPENIVVEMARENQFTNQGRRNSQQRLKGLTDSIKEFGSQILKEHPVENSQLQNDRLFLYYLQNGRDMYTGEELDIDYLSQYDIDHIIPQAFIKDNSIDNRVLTSSKENRGKSDDVPSKDVVRKMKSYWSKLLSAKLITQRKFDNLTKAERGGLTDDDKAGFIKRQLVETRQITKHVARILDERFNTETDENNKKIRQVKIVTLKSNLVSNFRKEFELYKVREINDYHHAHDAYLNAVIGKALLGVYPQLEPEFVYGDYPHFHGHKENKATAKKFFYSNIMNFFKKDDVRIDKNGEIIWKKDEHISNIKKVLSYPQVNIVKKVEEQTGGFSKESILPKGNSDKLIPRKTKKFYWDTKKYGGFDSPIVAYSILVIADIEKGKSKKLKTVKALVGVTIMEKMTFERDPVAFLERKGYRNVQEENIIKLPKYSLFKLENGRKRLLASARELQKGNEIVLPNHLGTLLYHAKNIHKVDEPKHLDYVDKHKDEFKELLDVVSNFSKKYTLAEGNLEKIKELYAQNNGEDLKELASSFINLLTFTAIGAPATFKFFDKNIDRKRYTSTTEILNATLIHQSITGLYETRIDLSKLGGD

SEQ ID NO: 1268 - protein, 1345 aa, Streptococcus mutans; identical to SEQ ID NO: 1267

SEQ ID NO: 1269 - protein, 1355 aa, Streptococcus mutans
MKKSYSIGLDIGTNSVGWAVVTDDYKVPAKKMKVLGNTDKSHIKKNLLGALLFDSGNTAEDRRLKRTARRRYTRRRNRILYLQEIFSEEMGKVDDSFFHRLDESFLTDDDKNFDSHPIFGNKAEEDAYHQKFPTIYHLRKHLADSTEKADLRLVYLALAHMIKFRGHFLIEGELNAENTDVQKLFADFVGVYDRTFDDSHLSEITVDASSILTEKISKSRRLEKLINNYPKEKKNTLFGNLIALSLGLQPNFKTNFKLSEDAKLQFSKDTYEEDLEELLGKIGDDYADLFTLAKNLYDAILLSGILTADDSSTKAPLSASMIKRYAEHHEDLEKLKEFIKANKPELYHDIFKDETKNGYAGYIENGVKQDEFYKYLKNTLSKIAGSDYFLDKIEREDFLRKQRTFDNGSIPHQIHLQEMHAILRRQGDYYPFLKENQDRIEKILTFRIPYYVGPLARKNSRFAWAEYHSDEAVMPWNFDQVIDKESSAQAFIEHMTNNDLYLPNEKVLPKHSPLYEKYTVYNELTKIKYVTEIGEAKFFDANLKQEIFDGLFKHERKVTKKKLRTFLDKNFDEFRIVDIQGLDKETETFNASYATYQDLLKVIKDKVFMDNPENAEILENIVLTLTLFEDREMIKQRLAKYADVFDKKVIDQLARRHYTGWGRLSAKLLNGIRDKQSCKTIMDYLIDDAQSNRNLMQLITDDNLTFKDDIVKAQYVDNSDDLHQVVQSLAGSPAIKKGILQSLKIVDELVKVMGKEPEQIVVEMARENQTTAKGRRNSQQRYKRLKEAIKSLDRDLNHKILKEHPTDNQALQNNRLFLYYLQNGRDMYTGESLDINRLSDYDIDHVIPQAFIKDNSIDNRVLTSSKANRGKSDDVPSEDVVNRMRPFWNKLLSSGLISQRKYNNLTKKELTPDDKAGFIKRQLVETRQITKHVARMLDERFNKEFDDNNKRIRRVKIVTLKSNLVSSFRKEFELYKVREINDYHHAHDAYLNAVVVKALLVKYPKLEPEFVYGEYPKYNSYRERKTATQKMFFYSNIMNMFKSKVKLADDQIVERPMIEVNDETGEIAWDKTKHITTVKKVLSYPQVNIVKKVEEQTIGQNGGLFDDNPKSPLEVIPSKLVPLKKALNPEKYGGYQKPTTAYPILLIVDTKQLIPISVMDKKRFEQNPVKFLKDKGYQQIEKNNFVKLPKYTLVDIGNGIKRLWASSKEVHKGNQLVVSKKSQDLLYHAHHLDNDYSNEYVKNHYQQFDILFNEITSFSKKCKLGKEHIQKIEEAYSKERDSASIEELADGFIKLLGFTQLGATSPFSFLGIKLNQKQYTGKKDYLLPCMEATLIHQSITGLYETRIDLNKLGGD

SEQ ID NO: 1270 - protein, 1355 aa, Streptococcus mutans; identical to SEQ ID NO: 1269

SEQ ID NO: 1271 - protein, 1125 aa, Streptococcus mutans
MTNGKILGLDIGIASVGVGIINAKTGNVEHASSRIFPAANADNNVERRSARGGRRLIRRKKHRLKRVEDLFEKYNIDTDFSNLNLNPYQLRVKGLNEQLSNEELFAILKNIAKRRGISYLDDAEDDSVGSSDYAKAIDENRKLLKKQTPGEIQLKRLEKYGQLRGNFTIQDENGEYHRLINVFSTSDYVKEARRILETQSYYNKFITESFVEDYIKILQGKRKYYVGPGNEKSRTDYGIYRTDGETLDNLFGILIGKCGFYPEEYRAAKASYTAQEYNFLNDLNNLTVPTETKKLSTEQKYQLVDFAKTASTLEAAKLLKEIAKLVGCQVEEIKGYRLDNKDKPDLHTFEPFRKLKSNLTTIAVENLSITTLDTLAHILTLNTEREGIEEAIQKELPNIFSDEQITGIIAVRKKNSQIFGKGWHSFSIKLMKELIPELYETSEEQMTILIRLKKVKTNSKITNRTKYINEQEVTDEIYNPVVSKSIRQTVKIINAAIKKYGAFDQIVIEMPRESNEEDERKFIADLQKSNAKEKDDAMKQAALLYNGKAELPHGVFHGHKELATKIRLWYQQGERCLYSGKHIDIHDLIHNQHMFEIDHVLPLSLSFDDSLANKVLVYSWANQEKGQRTPFQALPQMASAWSFRELRDYISKQKGISKKKRDYLLTEQDINKVEVKQKFIERNLVDTRYVSRVVLNTLQDALKVMNKETKISVIRGQFTSQLRRQWRIDKSRETYHHHAVDALIIAASSQLRLWKKQNNPMFAEDKHGQKINLDTGEVLSDDAYKELVYQAPYQGFVNTISSKSFEDEILFSYQVDSKVNRKISDATIYATRQAQLGKDKKEETYVLGKIKDIYSQAGYDAFRKKYDKDKAVFLMYQKDPETWEKVIEVILRDYKELDDKGKEIGNPFERYKVKHGFVRKYSRKNKGTEIKSLKYYDNKLGNHIDITPNNSKHSVVLQSINPWRADLYFNPETTKYELMGLKYADLSFEKGTGKYSISREKYDEIKEREGISSKSEFKFTLYKNDLILVKDIGNHKELIARFNSKNDTSKHYVELKPWNKAKFDSEEELIPAFGKVAKSGQFIKGLNKPDLSIYKVKTDILGHKYYIKKEGDKPKLNFENKIKNK

SEQ ID NO: 1272 - protein, 1125 aa, Streptococcus mutans
MTNGKILGLDIGIASVGVGIINAKTGNVEHASSRIFPAANADNNVERRSARGGRRLIRRKKHRLKRVEDLFEKYNIDTDFSNLNLNPYQLRVKGLNEQLSNEELFAILKNIAKRRGISYLDDAEDDSVGSSDYAKAIDENRKLLKKQTPGEIQLKRLEKYGQLRGNFTIQDENGEYHRLINVFSTSDYVKEARRILETQSYYNKFITESFVEDYIKILQGKRKYYVGPGNEKSRTDYGIYRTDGETLDNLFGILIGKCGFYPEEYRAAKASYTAQEYNFLNDLNNLTVPTETKKLSTEQKYQLVDFAKTASTLGAAKLLKEIAKLVGCQVEEIKGYRLDNKDKPDLHTFEPFRKLKSNLTTIAVENLSITTLDTLAHILTLNTEREGIEEAIQKELPNIFSDEQITEIIAVRKKNSQIFGKGWHSFSIKLMKELIPELYETSEEQMTILTRLKKVKTNSKITNRTKYINEEEITDEIYNPVVSKSIRQTVKIINATIKKYGAFDQIIIEMPRESNEEDERKFIADLQKSNAKEKDDAMKQAALLYNGKDELPHDVFHGHKELATKIRLWYQQGERCLYSGKHIDIHDLIHNQHMFEIDHVLPLSLSFDDSLANKVLVYSWANQEKGQRTPFQALPQMASAWSFRELRDYISKQKGISKKKRDYLLTEQDINKVEVKQKFIERNLVDTRYVSRVVLNTLQDALKVMNKETKISVIRGQFTSQLRRQWRIDKSRETYHHHAVDALIIAASSQLRLWKKQNNPMFAEDKHGQKINLDTGEVLSDDAYKELVYQAPYQGFVNTISSKSFEDEILFSYQVDSKVNRKISDATIYATRQAQLGKDKKEETYVLGKIKDIYSQAGYDAFRKKYDKDKAVFLMYQKDPETWEKVIEVILRDYKELDDKGKEIGNPFERYKVKHGFVRKYSRKNKGTEIKSLKYYDNKLGNHIDITPNNSKHSVVLQSINPWRADLYFNPETTKYELMGLKYADLSFEKGTGKYSISREKYDEIKEREGISSKSEFKFTLYKNDLILVKDIGNHKELIARFNSKNDTSKHYVELKPWNKAKFDSEEELIPAFGKVAKSGQFIKGLNKPDLSIYKVKTDILGHKYYIKKEGDKPKLNFENKIKNK

SEQ ID NO: 1273 - protein, 1125 aa, Streptococcus mutans; identical to SEQ ID NO: 1272

SEQ ID NO: 1274 - protein, 1125 aa, Streptococcus mutans; identical to SEQ ID NO: 1271

SEQ ID NO: 1275 - protein, 670 aa, Streptococcus oralis
MAKFNKNYSIGLDIGVSSVGYAVVTEDYRVPAFKFKVLGNTEKEKIKKNLIGSTTFVPAQSAQGTRVFRVNRRRIDRRNHRIAYLRDIFQKEIGKIDKNFYRRLDESFRVLGDKSEDIQIKQPFFGNKELETAYHKKYPTIYHLRKHLADADKNSPVADIREVYMALSHIFKYRGHFLTLGKIDPNNINMQNSWIDFIESCQDAFDLEISDESKTIAAIFKSSDNRQEKVKGILSYFQPELAKKDKSIFKQLLQLLFGLKTKFKECFELEEEPDLNFSKENYDENLENLLGTLEEDFPDVFAKLKILRDTILLSDMLTYTGATHARFSATMVERYEEHRKDLQRFKSFVKQNLSEQDYLDIFGRKTPNGFDVDKETKGYVGYISNKMVLTNKQKTIQQNFYDYISGKITGIEGAEYFLNKISDGTFLRKLRTTDNGTIPNQIHAYELEKIIERQGRDYPFLLENKDKLLSILTFKIPYYVGPLAKGNNSRFAWIKRTTSQDVLDNNDEDTKNGKIRPWNYHKLINMDETRDAFITNLIGNDIILLNEKVLPKRSLIYEEVMLQNELTRIKYKDKYGKIHFFDSELRQEIINNLFKTNSKRVSSAMLLAYLENFTNLQAVEIVSGIEKGKSLNSTLKTYNDLKTIFSEDLLDSEIYQKELEEIIKVITVFV

SEQ ID NO: 1276 - protein, 1373 aa, Streptococcus oralis
MENKNYSIGLDIGTNSVGWAVITDDYKVPSKKMKVLGNTDKRFIKKNLIGALLFDEGTTAEARRLKRTARRRYTRRKNRLRYLQEIFAEEMSKVDSSFFHRLDDSFLIPEDKKGSKYPIFATLIEEKEYHKQFPTIYHLRKQLADSKEKTDLRLIYLALAHMIKYRGHFLYEDTFDIKNNDIQKIFNEFISIYNNTFEGNSLSGQNVQVEAIFTDKISKSAKRERVLKLFPDEKSTGLFSEFLKLIVGNQADFKKHFDLEEKAPLQFSRDTYDEDLENLLGQIGDDFADLFVAAKKLYDAILLSGILTVTDPSTKAPLSASMIERYENHQKDLATLKQFIKTNLPEKYDEVFSDQSKDGYAGYIDGKTTQESFYKYIKNLLSKFEGADYFLEKIEREDFLRKQRTFDNGSIPHQIHLQEMNAILRRQGEHYPFLKENKEKIEKILTFRIPYYVGPLARGNRDFAWLTRNSDQAIRPWNFEEIVDKASSAESFINKMTNYDLYLPEEKVLPKHSLLYETFAVYNELTKVKFIAEGLRDYQFLDSRQKKDIFYTLFKAEDKRKVTEKDIIQYLHTVDGYDGIELKGIEKQFNASLSTYHDLLKIIKDKEFMDDPNNEEILENIVHTLTIFEDREMIKQRLAQYDSLFDEKVIKALTRRHYTGWGKLSSKLINGIRDKQTGKTILDYLMDDGYNNRNFMQLINDDELSFKEIIKKAQVVGKTDDVKQVVQELPGSPAIKKGILQSIKLVDELVKVMGHEPESIVIEMARENQTTARGKKNSQQRYKRIEDSLKILASGLNAKILKEHPTDNIQLQNDRLFLYYLQNGRDMYTGKPLDINQLSSYDIDHIVPQAFIKDDSLDNRVLTSLKDNRGKSDNVPSLEVVEKMKTFWQQLLDSKLISYRKFNNLTKAERGGLDERDKVGFIKRQLVETRQITKHVAQILDARYNTEVNEKDKKNRTVKIITLKSNLVSNFRKEFRLYKIREINDYHHAHDAYLNAVVAKAILKKYPKLEPEFVYGDYQKYDLKRYISRSKDPKEIEKATEKYFFYSNLLNFFKEEVHYADGTIVKRENIEYSKDTGEIAWNKEKDFATIKKVLSLPQVNIVKKREVQTGGFSKESILPKGNSDKLIPRKTKDILWDTTKYGGFDSPVIAYSILLIADIEKGKAKRLKTVKTLVGITIMEKATFEKSPIAFLENKGYHNVRKENILCLPKYSLFELKNGRRRMLASAKELQKGNEIVLPVHLTTLLYHAKNIHRLDEPEHLEYIQKHRNEFKGLLNLVSEFSQKYVLADANLEKIKNLYADNEQADIEILANSFINLLTFTALGAPAAFKFFGKDVDRKRYTTVSEILNATLIHQSITGLYETRIDLSKLGED

SEQ ID NO: 1277 - protein, 1371 aa, Streptococcus oralis
MENKNYSIGLDIGTNSVGWSVITDDYKVPSKKMKVLGNTDKRFIKKNLIGALLFDEGTTAEARRLKRTARRRYTRRKNRLRYLQEIFAEEMSKVDSSFFHRLDDSFLIPEDKRGSKYPIFATLAEEKEYHKQFPTIYHLRKQLADSKEKTDLRLIYLALAHMIKYRGHFLYEDTFDIKNNDIQKIFSEFISIYDNTFEGSSLSGQNAQVEAIFTDKISKSAKRERVLKLFPDEKSTGLFSEFLKLIVGNQADFKKHFDLGEKAPLQFSKDTYDEDLENLLGQIGDDFADLFLVAKKLYDAILLSGILTVTDPSTKAPLSASMIERYENHQKDLAVLKQFIKNNLPEKYDEVFSDQSKDGYAGYIDGKTTQEAFYKYIKNLLSKFEGTDYFLEKIEREDFLRKQRTFDNGSIPHQIHLQEMNAILRRQGEHYPFLKDNKEKIEKILTFRIPYYVGPLARGNRDFAWLTRNSDEAIRPWNFEEIVDKASSAEDFINKMTNYDLYLPEEKVLPKHSLLYETFAVYNELTKVKFIAEGLRDYQFLDSGQKKQIVTQLFKEKRKVTEKDIIQFLHNVDGYDGIELKGIEKQFNASLSTYHDLLKIIKDKEFMDDSKNEEILENIVHTLTIFEDREMIKQRLAQYDSLFDEKVIKALIRRHYTGWGKLSAKLIDGICDKQTGNTILDYLIDDGKNNRNFMQLINDDGLSFKEITQKAQVVGKTDDVKQVVQELPGSPAIKKGILQSIKIVDELVKVMGHTPESIVIEMARENQTTARGKKNSQQRYKRIEDALKNLASGLDSNILKEHPTNNIQLQNDRLFLYYLQNGRDMYTGKPLDINQLSSYDIDHIVPQAFIKDDSLDNRVLTSLKDNRGKSDNVPSIEVVQKRKAFWQQLLDSKLISERKFNNLTKAERGGLDERDKVGFIKRQLVETRQITKHVAQILDARFNKEVNEKDKKNRTVKIITLKSNLVSNFRKEFRLYKVREINDYHHAHDAYLNAVVAKAILKKYPKLEPEFVYGDYQKYDLKRYISRSRNPKEVEKATEKYFFYSNLLNFFKEEVHYADGTIVKRENIEYSKDTGEIAWNKEKDFATIKKVLSYPQVNIVKKREVQTGGFSKESILPKGNSDKLIPRKTKDILWETTKYGGFDSPVIAYSILLIADIEKGKAKKLKTVKTLVGITIMEKAAFEENPITFLENKGYHNVRKENILCLPKYSLFELENGRRRLLASAKELQKGNEIVLPVYLTTLLYHSKNVHKLDEPEHLEYIQKHRNEFKDLLNLVSEFSQKYVLADANLEKIQNLYADNEQADIEILANSFINLLTFTALGAPAAFKFFGKDIDRKRYTTVSEILNATLIHQSITGLYETRIDLSKLGED

SEQ ID NO: 1278 - protein, 1121 aa, Streptococcus oralis
MNGLVLGLDIGIASVGVGILEKNSGKIIHANSRLFPAATADNNVERRKNRQARRLNRRKKHRGVRFQDLFEDYGLLTDFSKVSINLNPYRLRVDGLNQQLTNEELFIALKNIVKRRGISYLDDASEDGGAVSSDYGKAVEENRKLLAEQTPGQIQLERFEKYGQVRGDFTVVENGEKCRLINVFSTSAYRKEAEKILRKQQEFNNQITDEFIEDYLKILTGKRKYYHGPGNEKSRTDYGRFRTDGTTLDNIFGVLIGKCTFYPNEYRASKSSYTAQEFNLLNDLNNLTVPTETKKLSEEQKKVIVEYAKEAKTLGASTLLKYIVKMIDASVDQISGYRVDVNNKPEMHTFEVYRKMQSLETISVGELSRNVLDELAHILTLNTEREGIEEAINSKLMGVFSQDQVLELVQFRKNNSSLFSKGWHNFSLKLMMELIPELYETSEEQMTILTRLGKQKSKETSKRTKYIDEKELTEEIYNPVVAKSVRQAIKIINEATKKHGIFDNIVIEMARENNEEDAKKDYIKRQKANQDEKNAAMEKAAFQYNGKKELPGNIFNGHKELATKIRLWHQQGEKCLYTGKTIPISDLIHNQYKYEIDHILPLSLSFDDSLSNKVLVHATANQEKGQRTPFQALDSMDDAWSYREFKSYVKDLKSLSNKKKDYLLTEEDISKIEVKQKFIERNLVDTRYSSRVVLNALQDFYKSHQFDTTISVVRGQFTSQLRRKWGLEKSRETYHHHAVDALIIAASSQLRLWKKQNNPLITYKEGQFVDSQTGEIISLTDDEYKELVFKAPYDHFVDTLHSKTFEDGILFSYQVDSKYNRKISDATIYATRKAKLDKDKSEETYVLGKIKDIYSQAGYDAFIKIYNKDKRKFLMYHKDPQTFEKVIEEILRTYPSKERNDKNKEVPCNPFEKYRQENGPIRKYSKKGNGPEIKCLKYYDNKLGNYIDISPDGSDNQVVLQSLKPWRTDVYFNHQTKEYELMGLKYSDLSFEKGSGKYSISNEKYNSIKRIEGVNEQSEFKFTLYKNDLILIKDSENNEQKLFRFNSRNDTAKHYVELKPYDKARFDGQQELITILGNVAKGGQCLKGLNKSNISIFKVKTDVLGKKHIIKKEGDEPKLKF

SEQ ID NO: 1279 - protein, 1134 aa, Streptococcus oralis
MNGLVLGLDIGIASVGVGILEKNSGKIVHASSRIFPAATADNNVERRKNRQARRLHRRKKHRGARLKDLFEYYGLLTDFSKVSINLNPYRLRVDGLDQQLTNEELFIALKNIVKRRGISYLDDASEDGGTVSSDYGKAVEENRKLLAEQTPGQIQLERFEKYGQLRGDFTVVENSEKCRLINVFSTSAYKKEAERILRKQQEFNNQITDEFIEDYLKILTGKRKYYHGPGNEKSRTDYGRFRTDGATLDNIFGILIGKCTFYPNEYRASKASYTAQEFNLLNDLNNLTVPTETKKLSEEQKKTIIEYAKSAKTLGASTLLKYIAKMIDASVDQIRGYRVDVNNKPEMHTFEVYRKMQSLETISVGELSRNILDELAHILTLNTEREGIEEAINTKLRDSFSQDQVLELVQFRKNNSSLFSKGWHNFSLKLMMELIPELYETSEEQMTILTRLGKQKSKETSKRTKYIDEKEVTEEIYNPVVAKSVRQAIKIINEATKKHGIFDNIVIEMARENNEEDAKKDYIKRQKANQDEKYAAMEKAAFQYNGKKELPDNIFHGHKELATKIRLWHQQGEKCLYTGKSIPISDLIHNQYKYEIDHILPLSLSFDDSLSNKVLVLATANQEKGQRTPFQALDSMDDAWSYREFKSYVKESKLLGNKKKEYLLTEEDISKIEVKQKFIERNLVDTRYSSRVVLNALQDFYKNHNFDTTISVVRGQFTSQLRRKWGLEKSRETYHHHAVDALIIAASSQLRLWKKQNNPLIAYKEGQFVDSQTGEIISLTDDEYKELVFKAPYDHFVDTLSSKTFEDSILFSYQVDSKFNRKISDATIYATRKAKLDKEKKEYTYTLGKIKDIYSLGTKTPSKTGFYKFLDLYNKDKSQFLMFQKDRKTWDEVIEKIMEQYRPFKEYDKAGKLVDFNPFEKYRQENGPIRKYSKKGNGPEIKSLKYYDILLGKHKNITPEGSRNTVALLSLNPWRTDVYYNMETKKYEFLGLKYADLPFEEGGAYGISTETYNELREKEGIGKNSEFKFTLYKNDLILIKDTETNCQQFFRFWSRTGKDNPKSFEKHKIELKPYEKAKFEKGEELEVLGKVPPSSNQFQKNMQIENLSIYKVKTDVLGNKHFIKKEGDKPKLKF

SEQ ID NO: 1280 - protein, 550 aa, Streptococcus oralis
MYSLDKNGSPTPLYRDQLNQYEVDHIIPYSFLPIDSIDNKVLTHRENNQRKLDNIPDKETVANMKPFWEKLYNAKLISQTKYQRLTTSERTPDGVLTESMKAGFIERQLVETRQIIKHVARILDNRFSDTKIITLKSQLVTNFRNTFHIAKIRELNDYHHAHDAYLAVVVGQTLLKAYPKLAPELIYGHHAHFNRHEENKATIRKYLYSNIMRFFNNPDSKVSKDIWDCNRDLPIIKDIIYNSQVNFVKRTMIKKGAFYNQNPVGKFNKQIAANNRYPLKTKVSSLDTSIYGGYGPMNSALSIIIIAERFNEKKCKIETVKEFHDIFIIDYKKFNNDPFQFLNDTSENGFLKKNNINRVLAFYRVPKYSLMQKIDGTRMLFESKSNLHKATQFKLTKTQNELFFHMRRLLTKSNLMDLKSESAIKESQNFILKHKEEFDNISNQLSAFSQKMLGDTTSLKNLIKGYNERKIKEINSSEETIKYFYDNFIKMFSFVKSGAPKDINDFFNNKYTVARMRPKPDKKLLNATLIHQSITGLYETRIDLSKLGED

SEQ ID NO: 1281 - protein, 1140 aa, Streptococcus parasanguinis
MNGLVLGLDIGIASVGVGILKKDIGEIIHTNSRLFSAATADSNIERRGHRGGKRLTRRKKHRSIRLHDLFEDFGLLTDFSKVSINLNPYQLRVQGLDNQLTNEELFIALKNIVKRRGISYLDDASEDGGTVSSDYGKAVEENRKLLAEQTPGQIQLDRFEKYGQVRGDFNVVENGEKRRLINVFTTSAYSKEAERILRKQQEFNKKITDEFIEDYLTILTGKRKYYHGPGNEKSRTDYGRYTTKKDPEGKYITLDNIFGILIGKCTFYPDEYRASKASYTAQEFNLLNDLNNLTVPTETKKLSEEQKKTIIKYAKTAKTLGASTLLKYIAKLIGASVDQIHGYRIDPNKKPEMHTFETYRKMQSLETISVEELPRKVLDELAHILTLNTEREGIEEAINATLKDTFSQDQVLELVQFRKNNSSLFSKGWHSFSLKLMMELIPELYETSEEQMTILTRLGKQKSKETSKRTKYIDEKELTEEIYNPVVAKSVRQAIKIINEATKKYGIFDNIVIEMARENNEEDAKKEYIKRQKANLDEKNAAMEKAAFQYNGKKELPDNVFHGHKELATKIRLWHQQGEKCLYTGKNIPISDLIQNQYKYEIDHILPLSLSFDDSLSNKVLVLATANQEKGQRTPFQALDSMDDAWSYREFKSYVKDSKLLGNKKKEYLLTEEDISKIEVKQKFIERNLVDTRYSSRVVLNALQDFYKEHQFDTTISVVRGQFTSQLRRKWGLEKSRETYHHHAVDALIIAASSQLRLWKKQNNPLISYTEGQFVDQVTGEIISLSDDEYKELVFKAPYDHFVDTLKSKKFEDSILFSYQVDSKYNRKISDATIYATRKAKLDKENKEYTYTLGKIKDIYALGTKSPSKTGFYKFLDLYNKDKSQFLMFQKDRKTWDEVIEKIIEQYRPFKEYDENGKEVDFNPFEKYRIENGPIRKYSKKGNGPEIKSLKYYDNLLGKFVDITPSESKNPVALLSLNPWRTDVYYNTETSKYEFLGLKYADLCFEKGGAYGISEVKYNKIREKEGIGKESEFKFTLYKNDLILIKDTETNCQQIFRFWSRTGKDNPKSFEKHKIELKPYEKARFEKGEELEVLGKVPPSSNQLQKNMQIENLSIYKVKTDVLGNKHFIKKEGEEPKLKF

SEQ ID NO: 1282 - protein, 1374 aa, Streptococcus pseudoporcinus
MKKRYSYSIGLDIGTNSVGWAVINEDYKVPAKKMTVFGNTDRKTIKKNLLGTVLFDSGETAQARRLKRTNRRRYTRRRYRLCQLQNIFATEMVKVDDTFFQRLSESFFYYQDKAFDKHPIFGNSKEERAYHKTYPTIYHLRKDLADRDQKADLRLIYLALSHIIKFRGHFLIEGKLNSENTDVQKLFIALVTVYNLLFEEEPIAGETCDAKALLTAKTSKSKRLESLISEFPGQKKNGLFGNLLALALGLRPNFKSNFGLSEDAKLQITKDTYEEELDNLLAEIGDHYADLFLAAKNLSDAILLSDILTLSDENTRAPLSASMIKRYEEHQEDLALLKKLVKEQMPEKYWEIFSNAKKNGYAGYIEGKVSQEDFYRYIKPILSRLKGGDEFLAKIDRDDFLRKQRTFDNGSIPHQIHLKELHAILRRQEKYYPFLAEQKEKIEQLLCFRIPYYVGPLAKGGNSSFAWLKRRSDEPITPWNFKDVVDEEASAQAFIEGMTNYDTYLPEEKVLPKHSPLYEMFTVYNELTKVKYIAENMTKPLYLSAEQKEAIIDHLFKQTRKVTVKDLKEKYFSQIEGLENVDVTGVEGAFNASLGTYNDLLKIIKDKAFLDDEANAEILEEIVLILTLFQDEKLIEKRLAKYANLFEKSVLKKLRKRHYRGWGRLSRQLIDGMKDKASGKTILDFLKADDFANRNFIQLINDSSLDFEKLIDDAQKKAIKRESLTEAVANLAGSPAIKKGILQSLKVVDEIVKVMGHNPDNIVIEMSRENQTTAQGLKNARQRLKKIKEVHKKTGSRILEDNSERITNLTLQDNRLYLYLLQDGKDMYTGQDLDINNLSQYDIDHIIPQSFIKDNSIDNLVLTTQKANRGKSDNVPSIEVVRDMKDRVWRRQLANGAISRQKFDHLTKAERGGLADSDKARFLRRQLVETRQITKHVAQLLDSRFNSKSNQNKKLARNVKIITLKSKIVSDFRKDFGLYKLREVNNYHHAHDAYLNAVVGTALLKKYPKLEAEFVYGDYKHFDLVKLISKSDPSLGKATAKVFFYSNIMNFFKEELSLADGTLMKRPVIETNTETGEVVWDKVKDFKTIRKVLSYPQVNIVKKTEIQSGAFSKESVLSKGNSDKLIERKKGWDPKKYGGFDSPNTAYSIFVVAKVAKRKAQKLKTVKEIVGITIMEQAEYEKDNIAFLEKKGYQDIQEKLLIKLPKYSLFELENGRRRLLASANEFQKGNELALSGKYMKFLYLASRYDKLSSKIESEQQKKLFVEQHLHYFDEILDIVVKHATCYIKAENNLKKIISLYKKKEAYSINEQALNMLNLFIFTSLGAPSTFVFFDETIDRKRYTTSSDVLNGILIQQSITGLYETRIDLSRFGGD

SEQ ID NO: 1283 - protein, 1052 aa, Streptococcus pyogenes
LSASMIKRYDEHHQDLTLLKALVRQQLPEKYKEIFFDQSKNGYAGYIDGGASQEEFYKFIKPILEKMDGTEELLAKLNREDLLRKQRTFDNGSIPHQIHLGELHAILRRQEDFYPFLKDNREKIEKILTFRIPYYVGPLARGNSRFAWMTRKSEETITPWNFEEVVDKGASAQSFIERMTNFDKNLPNEKVLPKHSLLYEYFTVYNELTKVKYVTEGMRKPAFLSGEQKKAIVDLLFKTNRKVTVKQLKEDYFKKIECFDSVEISGVEDRFNASLGTYHDLLKIIKDKDFLDNEENEDILEDIVLTLTLFEDREMIEERLKTYAHLFDDKVMKQLKRRRYTGWGRLSRKLINGIRDKQSGKTILDFLKSDGFANRNFMQLIHDDSLTFKEDLQKAQVSGQGDSLHEHIANLAGSPAIKKGILQTVKVVDELVKVMGRHKPENIVIEMARENQTTQKGQKNSRERMKRIEEGIKELGSDILKEYPVENTQLQNEKLYLYYLQNGRDMYVDQELDINRLSDYDVDHIVPQSFLKDDSIDNKVLTRSDKNRGKSDNVPSEEVVKKMKNYWKQLLNAKLITQRKFDNLTKAERGGLSELDKAGFIKRQLVETRQITKHVAQILDSRMNTKYDENDKLIREVRVITLKSKLVSDFRKDFQFYKVREINNYHHAHDAYLNAVVGTALIKKYPKLESEFVYGDYKVYDIRKMIAKSEQEIGKATAKYFFYSNIMNFFKTEITLANGEIRKRPLIETNGETGEIVWDKGRDFATVRKVLSMPQVNIVKKTEVQTGGFSKESILPKRNSDKLIARKKDWDPKKYGGFDSPTVAYSVLVVAKVEKGKSKKLKSVKELVGITIMERSSFEKDPVDFLEAKGYKEVRKDLIIKLPKYSLFELENGRKRMLASAGELQKGNELALPSKYVNFLYLASHYEKLKGSPEDNEQKQLFVEQHKHYLDEIIEQISEFSKRVILADANLDKVLSAYNKHRDKPIREQAENIIHLFTLTNLGAPAAFKCFDTTIGRNRYKSIKEVLDATLIHQSITGLYETRIDLSQLGGD

SEQ ID NO: 1284 - protein, 1368 aa, Streptococcus pyogenes; identical to SEQ ID NO: 37

SEQ ID NO: 1285 - protein, 1367 aa, Streptococcus pyogenes; identical to SEQ ID NO: 241

SEQ ID NO: 1286 - protein, 1368 aa, Streptococcus pyogenes [sequence omitted]

SEQ ID NO: 1287 - protein, 1370 aa, Streptococcus ratti
MKKPYSIGLDIGTNSVGWAVITDDYKVPAKKMKVLGNTDKNYIKKNLLGALLFDSGNTAEDRRLKRTARRRYTRRRNRLLYLQDIFSDEMNKVDESFFHRLEDSFLVSEDKRGDHHPIFGNVVDEVKYHEQFPTIYHLRKYLADTPEKADLRLVYLALAHMIKFRGHFLIDDPKLDVKNTDSQELFSQFLTAYDVTQEDSHLADVKINISDIITEKMNKSRKVEALLFHFPSQKKNSFFGNLVSLVFGLLPNFKTNFNLAEDAKLQLSKDSYDEDLENLLGQIGDEYTDVFVAARKLYDSILLSGILTVNDLSTKAILSASMVRRYEEHNKDLAKLKAFVKANFTHDVFKEVFSDASKNGYAGYIEGKTSQEDFYKYVKNLIGKVDGSADFIEKIDREDFLRKQRTFDNGSIPHQVHLAEMKAILRRQGEYYPFLKEHAEKIQQILTFRIPYYVGPLDRHGHSDFAWASFNSEEKVTPWNFEEIIDKNKSAQAFIERMTNQDLYLPNEKVLPKHSPLYEKYTVYNELTKIKYVTETGTAKFFDANLKQEIFDGLFKKERKVTKRKLLTFLEKNFDEFRIVDIQGLDKETETFNASYGIYQDLLKIIKDKAFMDDSENADILEDIVLTLTLFEDREMIKQRLAKYADLFDKKVIDNLARRRYTGWGRLSAKLLNGIRDKRSRKTIMDYLVDDGRSNRNLMQLITDDNLTFKDEIAKAQYSDNSDDLHQVVQDLAGSPAIKKGILQSVKIVDELVKVMGYEPEQIVVEMARENQTTAKGRRNSQQRYKRLEEAIKNLDRDLNYKILKEHPTDNQALQNDRLFLYYLQNGRDMYTGESLDINRLSDYDIDHIIPQAFIKDNSIDNRVLVSSAKNRGKSDDVPSEDVVNRMRPFWNKLLNCGLISQRKYSNLTKKELTPNDKAGFIKRQLVETRQITKHVARILDEHFNKEFDEDKKRIRKVKVVTLKSNLVSNFRKEFELYKVREINDYHHAHDAYLNAVVAKALLMKYPKLEPEFVYGEYPKYNSYRERKTATQRMFFYSNIMNMFKSKVKLADERIIERPMIEVNDETGEIAWDKTKHIATVKKVLSYPQINIVKKVEEQTGGLTNETIYPRGSFDKLLNRKNTLEASKYGGFGSPTVAYCVLVVADSKNENGKVKKLKLGSELLGITILEKNDFENNSLDFLSRKGYQGVQEKKIIKLPKYSLFEFQDGSRRMLSSVMANDNKRGDLQKANEMILPAYLVKLLYHAKHINSVGEPAHKNYINEHCSEFQDLLNYIRQFADKFVDVDKNLSKIRSLSKSMAEYSVSEICSSFVNLLTLTALGAPADFKFFGTTIPRKRYGSPQSILSATLIHQSITGLYETRIDLSKLGED

SEQ ID NO: 1288 - protein, 1135 aa, Streptococcus salivarius
MSDLVLGLDIGIGSVGVGILNKVTGEIIHKNSRIFPAAQAENNLERRTNRQGRRLTRRKKHRRVRLNHLFEESGLITDFTKVSINLNPYQLRVKGLTAELSNEELFIALKNMVKHRGISYLDDASDDGNSSVGDYAQIVKENSKQLETKTPGQIQLERYQKYGQLRGDFTVEEDGRKHRLINVFPTSAYHAEALRILQTQQEFNPQITDEFINSYLEILTGKRKYYHGPGNEKSRTDYGKYTTKKDAQGQYITLNNIFGILIGKCTFYPEEYRAAKASYTAQEFNLLNDLNNLTVPTETKKLSEEQKYQIITYVKNEKAMGPAKLFKYIAKLLACDIADIKGYRIDKSDKAEIHTFEAYRKMKTLETIDIEQIEREKLDKLAYVLTLNTEREGIQEALDHEFADGTFSQEQVDELVQFRKANSSIFGKGWHSFSVKLMMELIPELYATSEEQMTILTRLGKQKTTSSSNKTKYIDEKQLTEEIYNPVVAKSVRQAIKIVNAAIKKYGDFDNIVIEMARETNEDDEKKAIQKIQKANKAEKDAAMRKAANQYNGKAELPHSVFHGHKQLATKIRLWHQQGERCLYTGKTISIHDLINNPNQFEIDHILPLSITFDDSLANKVLVYATANQEKGQRTPYQALDSMDDAWSFRELKAFVRESKALSNKKKEYLLTEEDISKFDVRKKFIERNLVDTRYASRVVLNALQEHFKAHKIDTKVSVVRGQFTSQLRRHWGIDKTRDTYHHHAVDALIIAASSQLNLWKKQKNTLVSYSEDQLLDIETGELISDDEYKESVFKAPYQHFVDTLKSKEFEDSILFSYQVDSKFNRKISDATIYATRQAKVGKDKKDETYVLGKIKDIYALGTKTPSKTGFYKFLDLYNKDKSQFLVYQKDRKTWDEVIEKIMEQYRPFKESDKNGKEVDFNPFEKYRIENGPIRKYSRKGNGPEIKSLKYYASKLGNHIDITPKDSNNKVVLQSVSPWRADVYFNKTTGSYEILGLKYADLQFEKGTGTYRISEEKYNDIKKKEGVDSDSEFKFTLYKNDLLLIKDTETKEQRLFRFLSRSMPNKKHYVELKPYSKDKFEKNESLIEILGSADKSGRCIKGLAKSNLSIFKVRTDVLGNQHIIKNEGDKPKLDF

SEQ ID NO: 1289 - protein, 1127 aa, Streptococcus salivarius
MSDLVLGLDIGIGSVGVGILNKVTGEIIHKNSRIFPAAQAENNVERRINRQGRRLTRRKKHRRVRLNHLFEESGLITDFTNVSINLNPYQLRVKGLTDELSNEELFIALKNMVKHRGISYLDDASDDGNSSVGDYAQIVKENSKQLETKTPGQIQLERYQKYGQLRGDFTVEEDGKKHRLINVFPTSAYRAEALRILQTQQEFNPQITDEFINSYLQILTGKRKYYHGPGNEKSRTDYGRYTTKKDSEDEYITLDNIFGILIGKCTFYPEEYRAAKASYTAQEFNLLNDLNNLTVPTETKKLSEEQKNQIITNVKNEKAMGPAKLFKYIAKLLSCDVADIKGYRIDKSDKAEIHTFEAYRKMKTLATIDIEQMERENLDKLAYVLTLNTEKEGIQEALEHEFADGTFSQEQIDELVQFRKANSSIFGKGWHSFSVKLMMELIPELYATSEEQMTILTRLGKQKTTSSSNKTKYIDEKQLTEEIYNPVAAKSVRQAIKIVNAAIKEYGDFDNIVIEMARETNEDDEKKAIQKIQKANKDEKDAAMLKAANQYNGKAELPHSVFHGHKQLATKIRLWHQQGERCLYTGKTISIHDLINNSNQFEIDHILPLSITFDDSLANKVLVYATANQEKGQRTPYQALDSMDDAWSFRELKAFVRDSKALSNKKKEYLLTEEDISKFDVRKKFIERNLVDTRYASRVVLNALQEHFRVHKTDTKVSVVRGQFTSQLRRHWGIEKTRDTYHHHAVDALIIAASSQLNLWKKQKNTLVSYSEDQLLDIETGELISDDEYKESVFKAPYQHFVDTLKSKEFEDSILFSYQVDSKFNRKISDATIYATRQAKVGKDKKDETYVLGKIKDIYSQTGYDAFIKIYKKDKSKFLMYRHDPQTFEKVIEPILENYPNKELNEKGKEVPCNPFLKYKEDHGYIRKYSKKGNGPEIKSLKYYDSKLGNHIDITPKNSNNKVVLQSVSPWRADVYFNKTTGKYEILGLKYADLKFEKGTGTYKISEEKYNDIKIKEGVDSDSEFKFTLYKNDLLLIKDTETKEQQLFRFLSRTMPNVKHYVELKPYDKQKFDDNEELIKILGIVAKGGQCKKGVSKPNISIYKIRTDVLGNQHIIKNEGDKPKLDF

SEQ ID NO: 1290 - protein, 1385 aa, Streptococcus salivarius
MTKPYSIGLDIGTNSVGWAVITDDYKVPSKKMKVLGNTSKKYIKKNLLGALLFDSGITAEGRRLKRTARRRYTRRRNRILYLQEIFSTEMATLDDAFFQRLDDSFLVPDDKRDSKYPIFGNLVEEKVYHDEFPTIYHLRKHLADSSKKADLRLVYLALAHMIKYRGHFLIEGDFNSKNNDLQKNFQDFLDTYNAIFESDLSLENSKQLEEIVKDKISKSAKKDRILKLFPGEKNSGIFSEFLKLIVGNQADFRKYFNLDEKTSLQFSKESYDEDLETLLGHIGDDYSDVFLKAKKLYDAILLSGILTVTDNGTEAPLSSAMIMRYKEHEEDLALLKAYIRNISLETYNEVFKDNTKNGYAGYIDGKTSQEDFYVYLKRLLAGLEGADYFLEKIDREDFLRKQRTFDNGSIPYQIYLQEMRAILDKQAKFYPFLAKNKERIEKILTFRIPYYVGPLARGNSDFAWSIRKRNEKITPWNFEDVIDKESSAEAFINRMTSFDLYLPEEKVLPKHSLLYENFTVYNELTKVRFIAEGMRDYQFLDSKQKKDIVRLYFKGKRKVTDKDIIEYLHAIDGYDGIELKGIEKQFNSSLSTYHDLLNIINDKEFLDDSSNETIIEEIIHTLTMFEDREMIKQRLSKFDNIFDKSVLKKLSRRHYTGWGKLSAKLINGIRDEKSGNTILDYLIDDGVSNRNFMQLIHDDALSFKKKIKKAQIIGDKDNIKQVVKSLPGSPAIKKGILQSIKIVDELVKVMGREPESIVVEMARENQYTNQGKSNSQQRLKRLEESLKGLGSKILKENVPTRLSKIDNNALQNDRLYLYYLQNGKDMYTGEELDIDRLSNYDIDHIIPQAFLKDDSIDNKVLVSSASNRGKSDDVPSLEVVKKRKTLWYQLLKSKLISQRKFDNLTKAERGGLSQEEKAGFIQRQLVETRQITKHVARLLDERFNNKKDENNRTLRTVKIITLKSSLVSQFRKDFELYKVREINDFHHAHDAYLNAVVASALLKKYPKLEPEFVYGDYPKYNSFRERKSATEKVYFYSNIMNIFKKSIPLADGTVIDRPLIEVNEETGESVWNKVADLNTVRKVLSYSQVNIVKKVEEQNHGLDRGKPKGLFNANLSSKPKPNSKENLVGAKEYLDPKKYGGYAGISNSFAILVKGTIEKGAKKKITNVLEFQGISILDRIYYRKDKLNFLLEKGYKDIELIIELPKYSLFELSDGSRRMLASILSTNNKRGEIHKGNQIFISQKFVKLLYHAKRISSTFNENHRKYVENHKKEFEELFYYILEFNENYVGAKKNGELLKSAFQSWQNHSIDELCSSFIGPTGSERKGLFELTSRGGAADFEFLGVKIPRYRDYTPSSLLKDATLIHQSVTGLYETRIDLGKLGED

SEQ ID NO: 1291 - protein, 1392 aa, Streptococcus sanguinis
MENKNYSIGLDIGTNSVGWAVITDDYKVPSKKMKVFGNTDKHFIKKNLIGALLFDEGATAEDRRLKRTARRRYTRRKNRLRYLQEIFSEEISKLDSSFFHRLDDSFLVPKDKRGSKYPIFATLEEEKEYHKKFPTIYHLRKHLADSKEKTDLRLIYLALAHMIKYRGHFLYEESFDIKNNDIQKIFNEFISIYDNTFEGSSLSGQNAQVEAIFTDKISKSAKRERVLKLFSDEKSTSLFSEFLKLIVGNQADFKKHFDLEEKAPLQFSKDTYDEDLENLLGQIGDGFTDLFLVAKKLYDAILLSGILTVTDPSTKAPLSASMIERYESHQKDLAALKQFIKNNLPKRYNEVFSDQSKDGYAGYIDGKTTQEAFYKYIKNLLSKFEGADYFLDKIEREDFLRKQRTFDNGSIPHQIHLQEMNAILRRQGEHYPFLKENREKIEKILTFRIPYYVGPLARGNRDFAWLTRNSDQAIRPWNFEEIVDKASSAEEFINKMTNYDLYLPEEKVLPKHSLLYETFAVYNELTKVKFIAEGLRDYQFLDSGQKKQIVNQLFKEKRKVTEKDIIHYLHNVDGYDGIELKGIEKQFNASLSTYHDLLKIIKDKEFMDDPKNEEILENIVHTLTIFEDREMIKQRLAQYDSIFDEKVIKALTRRHYTGWGKLSAKLINGICDKQTGDTILDYLIDDGKINRNFMQLINDDGLSFKEIIQKAQVVGKTDDVKQVVQELPGSPAIKKGILQSIKIVDELVKVMGYAPESIVIEMARENQTTARGKKNSQQRYKRIEDSLKNLAPGLDSNILKENPTDNIQLQNDRLFLYYLQNGKDMYTGKPLDIDQLSSYDIDHIIPQAFIKDDSIDNRVLTSSKDNRGKSDNVPSLEVVQKRKAFWQQLLDSKLISERKFNNLTKAERGGLDERDKVGFIRRQLVETRQITKHVAQILDASFNTEVNEKNQKIRTVKIITLKSNLVSNFRKEFELYKVREINDYHHAHDAYLNAVVAKAILKKYPKLEPEFVYGDYQKYDLKRYISRFKPSKEIEKATEKYFFYSNLLNFFKEEVHYADGIIVKRENIEYSKDTGEIAWNKEKDFATIKKVLSYPQVNIVKKTEIQTHGLDRGKPKGLFNSNPSPKPSEDSKENLVPIKQGLDPRKYGGYAGISNSYAVLVKAIVEKGAKKQQKTILEFQGISILDKINFENNKENYLLKKRYIEILSTITLPKYSLFEFPDGTRRRLASILSTNNKRGEIHKGNELVLPGKYTTLLYHAKNINKKLEPEHLEYVEKHRNDFAKLLECVLNFNDKYVGALKNGERIRQAFTDWETVDIEKLCFSFIGPENSKNAGLFELTSQGSASDFEFLGVKIPRYRDYAPSSLLKATLIHQSITGLYETRIDLSKLGED

SEQ ID NO: 1292 - protein, 1377 aa, Streptococcus sanguinis
MKKPYSIGLDIGTNSVGWAVITDDYKVPSKKMKVLGNTDKHFIKKNLIGALLFDEGTTAEDRRLKRTSRRRYTRRKNRLRYLQEIFSEEISKLDSSFFHRLDDSFLVPEDKRGSKYPIFATLEEEKEYHKKFPTIYHLRKHLADSKEKTDLRLIYLALAHMIKYRGHFLYEESFDIKNNDIQKIFNEFISIYDNTFEGSSLSGQNAQVEAIFTDKISKSTKRERVLKLFSDEKSTGLFSEFLKLIVGNQADFKKHFDLEEKAPLQFSKDTYDEDLENLLGQIGDGFADLFLVAKKLYDAILLSGILTVTDPSTKAPLSASMIERYENHQEDLAALKQFIKNNLSEKYAEVFSDQSKDGYAGFIDGKTTQEAFYKYIKNLLSKLEGADYFLNKIEREDFLRKQRTFDNGSIPHQIHLQEMNAILRRQGEHYLFLKENREKIEKILAFRIPYYVGPLARGNRDFAWLTRNSDQAIRPWNFEEVVDKASSAEDFINKMTNYDLYLPEEKVLPKHSLLYETFAVYNELTKVKFIAEGLRDYQFLDSGQKKQIVNQLFKDKRKVTEKDIIHYLHNVDGYDGIELKGIEKQFNASLSTYHDLLKIIKDKEFMDNPKNGEILENIIHTLTIFEDREMIKQRLAQYDTLFDEKVIKALTRRHYTGWGKLSAKLINGIRDKQTGKTILEYLIDDGDCNRNFMQLINDDGLSFKEIIQKAQVVGKTDDVKQVVQEIPGSPAIKKGILQSIKIVDELVKVMGHNPESIVIEMARENQTTAKGKKNSQQRYKRIEDALKNLAPGLDSNILKENPTDNIQLQNDRLFLYYLQNGKDMYTGKAIDINQLSNYDIDHIIPQAFIKDDSLDNRVLTSSKDNRGKSDNVPSIEVVQKRKAFWQQLLDSKLISERKFNNLTKAKRGGLDERDKVGFIKRQLVETRQITKHVAQLLDTRFNTEVNEENQKIRTVKIITLKSNLVSNFRKEFGLYKVREINDYHHAHDAYLNAVVAKAILKKYPKLEPEFVYGDYQKYDLKRYILKSKASNTIDKATEKYFFYSNLLNFFKEKVRYADGTIKKRENIEYSNDTGEIAWNKEKDFATIKKVLSLPQVNIVKKTEEQTVGQNGGLFDNNIVSKKKVVDASKLIPIKSSLSPEKYGGYARPTIAYSVLVIADIEKGKGKAKKLKRIKEIVGITIQDKKKFESNPVTYLEECGYKNINSNLIIKLPKYSLFEFNDGQRRLLASSIELQKGNELILPYHLTALLYHAQRINKISEPIHKQYVEAHQNEFKELLTTIISLSKKYIQKPNVELLLQQAFDQADKDIYQLSESFISLLKLTSFGAPGAFKFLGVEISQSSVRYKPNSQFLDTTLIHQSITGLYETRIDLSKLGED

SEQ ID NO: 1293 - protein, 1370 aa, Streptococcus sanguinis
MKKPYSIGLDIGTNSVGWAVVTDDYKVPAKKMRVFGDTDRSHIKKNLLGTLLFDDGNTAESRRLKRTARRRYTRRRNRILYLQEIFTESMNEIDESFFHRLDDSFLVPEDKRGSKYPIFATLQEEKEYHKQFPTIYHLRKQLADSKEKSDVRLIYLALAHMIKYRGHFLYEETFDIKNNDIQKIFNEFINIYDNTFEGSSLSGQNAQVEAIFTDKISKSAKRERVLKLFPDEKSTGLFSEFLKLIVGNQADFKKHFDLEEKAPLQFSKDTYDEELENLLGQIGDDFADLFLIAKKLYDAILLSGILTVTDPSTKAPLSASMIERYENHQKDLAALKQFIKNNLPEKYVEVFSDQSKDGYAGYIDGKTTQEAFYKYIKNLLSKFEGADYFLDKIEREDFLRKQRTFDNGSIPHQIHLQEMNAILRRQGEHYPFLKENREKIEKILTFRIPYYVGPLARDNRDFSWLTRNSDEPIRPWNFEEVVDKARSAEDFIHRMTNYDLYLPEEKVLPKHSLLYETFAVYNELTKVKFIAEGLRDYQFLDSGQKKQIVNQLFKEKRKVTEKDIIHYLHNVDGYDGIELKGIEKQFNANLSTYHDLLKITKDKEFMDDPKNEEILENIVHTLTIFEDREMIKQRLAQYDTLFDEKVIKALTRRHYTGWGKLSAKLINGIRDKQSGKTILDYLIDDDKINRNFMQLINDDGLSFKEIIQKAQVVGKTDDVKQVVQELPGSPAIKKGILQSIKIVDELVKVMGYALESIVIEMARENQTTARGKKNSQQRYKRIEDALKNLAPGLDSNILKENPTDNIQLKNDRLFLYYLQNGKDMYTGKPLDINQLSSYDIDHIIPQAFIKDDSIDNRVLTSSKDNRGKSDNVPSLEVVQKRKAFWQQLLDSKLISERKFNNLTKAERGGLDERDKVGFIRRQLVETQQITKNVAQILDARFNTEVKEKNQKIRTVKIITLKSNLVSNFRKEFGLYKVREINNYHHAHDAYLNAVVAKAILKKYPKLEPEFVYGDYQKYDLKKYISRFKPSKEIEKATEKYFFYSNLLNFFKEEVLYADGTIRKRENIEYSKDTGEIAWDKEKDFATIKKVLSYPQVNIVKKREVQTGGFSKESILPKGNSDKLIPRKTKDILWDTTKYGGFDSPVIAYSILLIADIEKGKAKKLKTVKTLVGITIMEKAAFEENPITFLENKGYHNVRKENILCLPKYSLFELENGRRRLLASAKELQKGNEIVLPVCLTTLLYHSKNLHKLDEPEHLEYIQKHRNEFKDLLNLVSEFSQKYILAEANLEKIKDLYADNEQADIEILANSFINLLTFTALGAPAAFKFFGKDVDRKRYTTVSEILNATLIHQSITGLYETRIDLSKLGEE

SEQ ID NO: 1294 - protein, 1421 aa, Streptococcus sanguinis
MTKFNKNYSIGLDIGVSSVGYAVVTEDYRVPAFKFKVLGNTEKEKIKKNLIGSTTFVSAQPAKGTRVFRVNRRRIDRRNHRITYLRDIFQKEIEKVDKNFYRRLDESFRVLGDKSEDLQIKQPFFGDKELETAYHKKYPTIYHLRKHLADADKNSPVADIREVYMAISHILKYRGHFLTLDKINPNNINMQNSWIDFIESCQEVFDLEISDESKNIADIFKSSENRQEKVKKILPYFQQELLKKDKSIFKQLLQLLFGLKTKFKDCFELEEEPDLNFSKENYDENLENFLGSLEEDFSDVFAKLKVLRDTILLSGMLTYTGATHARFSATMVERYEEHRKDLQRFKFFIKQNLSEQDYLDIFGRKTQNGFDVDKETKGYVGYITNKMVLTNPQKQKTIQQNFYDYISGKITGIEGAEYFLNKISDGTFLRKLRTSDNGAIPNQIHAYELEKIIERQGKDYPFLLENKDKLLSILTFKIPYYVGPLAKGSNSRFAWIKRATSSDILDDNDEDTRNGKIRPWNYQKLINMDETRDAFITNLIGNDIILLNEKVLPKRSLIYEEVMLQNELTRVKYKDKYGKAHFFDSELRQNIINGLFKNNSKRVNAKSLIKYLSDNHKDLNAIEIVSGVEKGKSFNSTLKTYNDLKTIFSEELLDSEIYQKELEEIIKVITVFDDKKSIKNYLTKFFGHLEILDEEKINQLSKLRYSGWGRYSAKLLLDIRDEDTGFNLLQFLRNDEENRNLTKLISDNTLSFEPKIKDIQSKSTIEDDIFDEIKKLAGSPAIKRGILNSIKIVDELVQIIGYPPHNIVIEMARENMTTEEGQKKAKTRKTKLESALKNIENSLLENGKVPHSDEQLQSEKLYLYYLQNGKDMYTLDKTGSPAPLYLDQLDQYEVDHIIPYSFLPIDSIDNKVLTHRENNQQKLNNIPDKETVANMKPFWEKLYNAKLISQTKYQRLTTSERTPDGVLTESMKAGFIERQLVETRQIIKHVARILDNRFSDTKIITLKSQLITNFRNTFHIAKIRELNDYHHAHDAYLAVVVGQTLLKVYPKLAPELIYGHHAHFNRHEENKATLRKHLYSNIMRFFNNPDSKVSKDIWDCNRDLPIIKDVIYNSQINFVKRTMIKKGAFYNQNPVGKFNKQLAANNRYPLKTKALCLDTSIYGGYGPMNSALSIIIIAERFNEKKGKIETVKEFHDIFIIDYEKFNNNPFQFLNDTSENGFLKKNNINRVLGFYRIPKYSLMQKIDGTRMLFESKSNLHKATQFKLTKTQNELFFHMKRLLTKSNLMDLKSKSAIKESQNFILKHKEEFDNISNQLSAFSQKMLGNTTSLKNLIKGYNERKIKEIDIRDETIKYFYDNFIKMFSFVKSGAPKDINDFFDNKCTVARMRPKPDKKLLNATLIHQSITGLYETRIDLSKLGED

SEQ ID NO: 1295 - protein, 317 aa, Streptococcus sp.
FEDSILFSYQVDSKFNRKISDATIYATRKAKLDKEKSEETYVLGKIKDIYSQAGYDAFIKIYNKDKSKFLMYHKDPQTFEKVIEEILRTYPSKELNDKNKEIPCNPFEKYRQENGPIRKYSKKSNGPEIKSLKYYDNKLGNHIDITPESSDNQVVLQSLKPWRTDVYFNHQTKKYELMGLKYSDLSFEKGSGKYSISNQKYNSIKRIEGIDEQSEFKFTLYKNDLILIKDSENNEQKLFRFNSRNDTAKHYIELKPYDKAKFDGEQELITILGNVAKGGRCLKGLNKSNISIFKVKTDVLGKKHIIKKEGDEPKLKF

SEQ ID NO: 1296 - protein, 1420 aa, Streptococcus sp.
MAKFNKNYSIGLDIGVSSVGYAVVTEDYRVPAFKFKVLGNTEKEKIKKNLIGSTTFVPAQSAQGTRVFRVNRRRIDRRNHRIAYLRDIFQKEIEKIDKNFYRRLDESFRVLGDKSEDIQIKQPFFGNKELETAYHKKYPTIYHLRKHLADADKNSPVADIREVYMVLSHILKYRGHFLTLGKIDPNNINMQNSWIDFIESCQDAFDLEISDESKTIAAIFKSSENRQEKVKQILSYFQQELLKKDKSIFKQLLQLLFGLKTKFKDCFELEEEPDLNFSKENYDENLENLLGALEEDFSDVFAKLKILRDTILLSSMLTYTGATHARFSATMVERYEEHRKDLQRFKSFVKQNLSEQDYLDIFGRKTPTGFDVDKETKGYVGYISNKMVLTNPQKQKTIQQNFYDYISGKITGIEGAECFLNKISDGTFLRKLRTTDNGAIPNQIHAYELEKIIERQGRDYPFLLENKDKLLSILTFKIPYYVGPLAKGNNSRFAWIKRTTSQDVLDDNDEDTRNGKIRPWNYHKLINMDETRDAFIINLIGNDIILLNEKVLPKRSLIYEEVMLQNELTRVKYKDKYGKIHFFNSELRQEIINNLFKTNSKRVSSAMLLSYLENFTNLQAVEIVSGIEKGKSLNSTLKTYNDLKTIFSEELLDSEIYQKELEEIIKVITVFDDKKSIKNYLTKYFGHLEFLNEEKINQLSKLRYTGWGRYSGKLLLGIRDEDTGFNLMQFLRNDDENRNLTQLISDTTLSFDSAIKAIQSKSTVEDDVFEEIKNLAGSPAIKRGILNSIKIVDELVQIIGYPPQNIIIEMARENMTTEEGQKKAKTRKSKLESALKNIEDSVLESGKVPHSDEQLQSEKLYLYYLQNGKDMYSLDKTGSPTPLYRDQLDQYEVDHIIPYSFLPIDSIDNKVLTHRENNQRKLNNIPDKETVANMKPFWEKLYNAKLISQTKYQRLTTSERTPDGVLTESMKAGFIERQLVETRQIIKHVARILDNRFSDTKIITLKSQLVTNFRNTFHIAKIRELNDYHHAHDAYLAVVVGQTLLKAYPKLAPELIYGHHAHFNRHEENKATLRKHLYSNIMRFFNNPDSKVSKDIWDCNRDLPIVKDVIYNSQINFVKRTMIKKGAFYNQNPVGKLNKQIAANNRYPLKTKVSSLDTSIYGGYGPMNSALSIIIIAERFNEKKGKIETVKEFHDIFIIDYEKFNNNPFQFLNNVSEEGFLKKNDLNRVLAFYRISKYSLMQKIDGTRMLFESKSNLHKVTQFKLTKTQNELFFHMKRLLTKSNLMDLKSESAIKESQNFIQTHQNEFDNIADRLSNYSQKMLGETKSLQTLINGYNERPIKQIDNNEETIRYYYDNFIKMFSFVKSGAPKDIINFFNDKYTVPRMRPKPDRKMLDATLIHQSITGLYETRIDLSKLGED

SEQ ID NO: 1297 - protein, 1371 aa, Streptococcus sp.
MENKNYSIGLDIGTNSVGWSVITDDYKVPSKKMKVLGNTDKHFIKKNLIGALLFDEGTTAEARRLKRTARRRYTRRKNRLRYLQEIFSEEIGKVDSSFFHRLDDSFLIPEDKRGSKYPIFATLAEEKKYHKQFPTIYHLRKQLADSKEKTDLRLIYLALAHMIKYRGHFLYEEAFDIKNNDIQKIFNEFISIYNNTFEGNSLSGQNVQVEAIFTDKISKSAKRERVLKLFPDEKSTGLFSEFLKLIVGNQADFKKHFDLEEKAPLQFSRDTYDEDLENLLGQIGDDFADLFLVAKKLYDAILLSGILTVTNPSTKAPLSASMIERYENHQKDLASLKQFIKNNLPEKYDEVFSDQSEDGYAGYIDGKTTQETFYKYIKNLLSKFEGADYFLDKIEREDFLRKQRTFDNGSIPHQIHLQEMNAILRRQGEHYPFLKENKEKIEKILTFRIPYYVGPLARGNRDFAWLTRNSDQAIRPWNFEEIVDKASSAEDFINKMTNYDLYLPEEKVLPKHSLLYETFAVYNELTKVKFIAEGLRDYQFLDSGQKKQIVTQLFKEKRKVTEKDIIQFLHNVDGYDGIELKGIEKQFNASLSTYHDLLKIIKDKAFMDDAKNEAILENIVHTLTIFEDREMIKQRLAQYDSLFDEKVIKALTRRHYTGWGKLSAKLINGISDKQTGNTILDYLIDDGEINRNFMQLINDDGLSFKEIIQKAQVVGKTNDVKQVVQELPGSPAIKKGILQSIKIVDELVKVMGHAPESIVIEMARENQTTARGKKNSQQRYKRIEDSLKILASGLNSKILKEHPTDNIQLQNDRLFLYYLQNGKDMYTGEALDINQLSSCDIDHIIPQAFIKDDSLDNRVLTSSKDNRGKSDNVPSLEVVDKMKVFWQQLLDSKLISYRKFNNLTKAERGGLNELDKVGFIKRQLVETRQITKHVAQILDARFNKEVTEKDKKNRTVKIITLKSNLVSNFRKEFELYKVREINDYHHAHDAYLNAVVAKAILKKYPKLEPEFVYGDYQKYDLKRYISRSKDPKEIEKATEKYFFYSNLLNFFKEEVHYADGTIVKRENIEYSKDTGEIAWNKEKDFATIKKVLSLPQVNIVKKREVQTGGFSKESILPKGNSDKLIPRKTKDILWDTTKYGGFDSPVIAYSILLIADIEKGKAKKLKTVKTLVGITIMEKDAFEKNPIAFLENKGYHNVCKENILCLPKYSLFELENGRRRLLASAKELQKCNEIVLPVYLTTLLYHSKNVHKLDEPGHLEYIQKHRNEFKDLLNLVSEFSQKYVLADANLEKIKNLYADNEQADIEILANSFINLLTFTALGAPAAFKFFGKDVDRKRYTTVSEILNATLIHQSITGLYETRIDLSKLGED

SEQ ID NO: 1298 - protein, 93 aa, Streptococcus sp.
MILIKDSENNEQKLFRFNSRNDTAKHYVELKPYDKARFDGQQELITILGNVAKGGQCLKGLNKSNISIFKVKTDVLGKKHIIKKEGDEPKLKF

SEQ ID NO: 1299 - protein, 1121 aa, Streptococcus sp.
MNGLVLGLDIGIASVGVGILEKNSGKIIHANSRLFPAATADNNVERRKNRQARRLHRRKKHRGVRFQDLFEDYGLLTDFSKVSINLNPYRLRVDGLNQQLTNEELFIALKNIVKRRGISYLDDASEDGGTVSSDYGKAVEENRKLLAEQTPGQIQLERFEKYGQVRGDFTVVENGEKRRLINVFSTSAYRKEAERILRKQQEFNSKITDEFIEDCLKILTGKRKYYHGPGNEKSRTDYGRFRTDGTTLDNIFGILIGKCTFYPDEYRASKASYTAQEFNLLNDLNNLTVPTETKKLSEEQKKVIVEYAKEAKTLGASTLLKYIAKMIDASVDQIRGYRVDVNNKPEIHTFEAYRKMQSLETISVGELSRNVLDELAHILTLNTEREGIEEAINTKLKDSFSQDQVLELVQFRKNNSSLFSKGWHNFSLKLMMELIPELYETSEEQMTILTRLGKQKSKEISKRTKYIDEKELTEEIYNPVVAKSVRQAIKIINEATKKHGIFDNIVIEMARENNEEDAKKDYIKRQKANQDEKNAAMEKAAFQYNGKKELPDSIFHGQKELATKIRLWHQQGEKCLYTGKNIPISDLIHNQYKYEIDHILPLSLSFDDSLSNKVLVLATANQEKGQRTPFQALDSMDDAWSYREFKSYVKESKLLGNKKKEYLLTEEDISKIEVKQKFIERNLIDTRYSSRVVLNALQDFYKAHKFDTTISVVRGQFTSQLRRKWGLEKSRETYHHHAVDALIIAASSQLRLWKKQNNPLIAYKEGQFVDSETGEIISLSDDEYKELVFKAPYDHFVDTLSSKTFEDSILFSYQVDSKFNRKISDATIYATRKAKLDKEKSEETYVLGKIKDIYSQAGYDAFIKIYNKDKSKFLMYHKDPQTFEKVIEEILRTYPSKELNDKNKEIPCNPFEKYRQENGPIRKYSKKSNGPEIKSLKYYDNKLGNHIDITPESSDNQVVLQSLKPWRTDVYFNHQTKKYELMGLKYSDLSFEKGSGKYSISNQKYNSIKRIEGIDEQSEFKFTLYKNDLILIKDSENNEQKLFRFNSRNDTAKHYIELKPYDKAKFDGEQELITILGNVAKGGRCLKGLNKSNISIFKVKTDVLGKKHIIKKEGDEPKLKF

SEQ ID NO: 1300 - protein, 1026 aa, Streptococcus sp.
MNGLVLGLDIGIASVGVGILEKNSGKIIHANSRLFPAATADNNVERRKNRQARRLNRRKKHRGVRFQDLFEDYGLLTDFSKVSINLNPYRLRVDGLNQQLTNEELFIALKNIVKRRGISYLDDASEDGGAVSSDYGKAVEENRKLLAEQTPGQIQLERFEKYGQVRGDFTVVENGEKRRLINVFSTSAYRKEAEKILRKQQEFNNQITDEFIEDYLKILTGKRKYYHGPGNEKSRTDYGRFRTDGTTLDNIFGVLIGKCTFYPNEYRASKSSYTAQEFNLLNDLNNLTVPTETKKLSEEQKKVIVEYAKEAKTLGASTLLKYIVKMIDASVDQISGYRVDVNNKPEMHTFEVYRKMQSLETISVGELSRNVLDELAHILTLNTEREGIEEAINSKLMGVFSQDQVLELVQFRKNNSSLFSKGWHNFSLKLMMELIPELYETSEEQMTILTRLGKQKSKETSKRTKYIDEKELTEEIYNPVVAKSVRQAIKIINEATKKHGIFDNIVIEMARENNEEDAKKDYIKRQKANQDEKNAAMEKAAFQYNGKKELPGNIFNGHKELATKIRLWHQQGEKCLYTGKTIPISDLIHNQYKYEIDHILPLSLSFDDSLSNKVLVHATANQEKGQRTPFQALDSMDDAWSYREFKSYVKDLKSLSNKKKDYLLTEEDISKIEVKQKFIERNLVDTRYSSRVVLNALQDFYKSHQFDTTISVVRGQFTSQLRRKWGLEKSRETYHHHAVDALIIAASSQLRLWKKQNNPLITYKEGQFIDSQTGEIISLTDDEYKELVFKAPYDHFVDTLHSKTFEDGILFSYQVDSKYNRKISDATIYATRKAKLDKDKSEETYVLGKIKDIYSQAGYDAFIKIYNKDKRKFLMYHKDPQTFEKVIEEILRTYPSKERNDKNKEVPCNPFEKYRQENGPIRKYSKKGNGPEIKCLKYYDNKLGNYIDISPDGSDNQVVLQSLKPWRTDVYFNHQTKKYELMGLKYSDLSFEKGSGKYSISNEKYNSIKRIEGVNEQSEFKFTLYK

SEQ ID NO: 1301 - protein, 1377 aa, Streptococcus sp.
MNNKPYSIGLDIGTNSVGWSVITDDYKVPSKKMKVLGNTDKRFIKKNLIGALLFDEGTTAEARRLKRTARRRYTRRKNRLRYLQEIFAEEMSKVDSSFFHRLDDSFLIPEDKRGSKYPIFATLVEEKEYHKQFPTIYHLRKQLADSKEKADLRLIYLVLAHMIKYRGHFLYEEAFDIKNNDIQKIFNEFISIYDNTFEGSSLSGQNAQVETIFTDKISKSAKRERVLKLFPDEKSTGLFSEFLKLIVGNQADFKKHFDLEEKAPLQFSKDTYDEDLENLLEQIGDDFADLFVAAKKLYDAILLSGILTVTDPSTKAPLSASMIERYENHQKDLAVLKQFIKTNLPEKYVEVFSDQSKDGYAGYIDGKTTQEAFYKYIKNLLSKFDGADYFLDKIEREVFLRKQRTFDNGSIPHQIHLQEMNTILRRQGEHYPFLKENKEKIEKILTFRIPYHVGPLARGNRDFAWLTRNSDQAIRPWNFEEIVDKASSAEDFINKMTNYDLYLPEEKVLPKHSLLYETFAVYNELTKVKFIAEGMRDYQFLDSGQKKKIINQLFKKKRKVTEDDIIDCLQKIDNYDGIELKGIEKQFNASLSTYHDILKIIRDKEFMDDPKNGDILENVIHTLTIFEDREMIKQRLAQYNSIFDEKVIKALSRKHYTGWGKLSAKLIDGIRDKQTGKTILDYLMDDGKSNRNFMQLIKDDELSFTEIIQKAQVVGDTDNLRQVVQNLPGSPAIKKGILQSIKIVDELVKVMGHAPESIVIEMARENQTTARGKKNSQQRYKRIEDSLKNLASGLDSNILKENPTDNIQLQNDRLFLYYLQNGKDMYTGEALNINQLSSYDIDHIIPQAFIKDDSLDNRVLTSSKDNRGKSDNVPSLEVVEKMKAFWQQLLDSKLISERKYNNLTKAERERGGLNELDKVGFIKRQLVETRQITKHVAQILDARFNKEVTEKNKKNRNVKIITLKSNMVSNFRKEFGLYKVREINDYHHAHDAYLNAVVAKAILKKYPKLEPEFVYGDYQKYDLKRYISRSKDPKEVEKATEKYFFYSNLLNFFKEEVHYADGTIVKRENIEYSKDTGEIAWNKEKDFATIKKVLSLPQVNIVKKTEEQTVGQNGGLFDNNIVSKKKVVDASKLIPIKSGLSPEKYGGYARPTIAYSVLVTYKQNNKIKNTMVGIPVLTKLEFERDPNLYLRNLGINNVSHVIKLVKYTVLEFKHKYGTYRRFIVSNQELKRANQIFVTTKQMKLISQYTTLDKNEHDSLLKNNQQLIQSIWNQFLEFMLATDLVNKKQYDELILTNNQTIEECRNIMNRVITTLSFTNINAGQKKIIFDDTLSLPIKRWQFTDSDKMVKKIIESTLIHQSITGLYETRIDLSKLGED

SEQ ID NO: 1302 - protein, 1371 aa, Streptococcus sp.
MNNNNYSIGLDIGTNSVGWAVITDDYKVPSKKMRVLGNTDKRFIKKNLIGALLFDEGTTAEDRRLKRTARRRYTRRKNRLRYLQEIFAEEMSKVDSSFFHRLDDSFLVPEDKSGSKYPIFATLAEEKEYHKKFPTIYHLRKHLADSKEKADLRLIYLALAHITKYRGHFLYEEAFDIKNNDIQKIFNEFINIYDNTFEGSSLSGQNAQVEAIFTGKISKSVKREHVLKLFPDEKSTGLFSEFLKLIVGNQADFKKHFDLEEKASLQFSKDTYDEDLENLLGQIGDDFADLFLVAKKLYDAILLSGILTVTDPSTKAPLSASMIERYENHQEDLAALKQFIKNNLPEKYAEVFSDQSKDGYAGYIDGKTTQEAFYKYIKNLLSKFEGADYFLDKIEREDFLRKQRTFDNGSIPHQIHLQEMNAILRRQGEHYPLLKENKEKIEKILTFRIPYYVGPLARGNRDFAWLTRNSDQAIRPWNFEEIVDKASSAESFINKMTNYDLYLPEEKVLPKHSLLYETFAVYNELTKVKFIAEGLRDYQFFDSGQKKQIVNQLFKEKRKVTEKDIIHYLHNVDGYDGIELKGIEKQFNASLSTYHDLLKIIKDKEFMDNHKNQEILENIVHTLTIFEDREMIKQRLAQYDSIFDEKVIKALTRRHYTGWGKLSAKLINGICDKKTGKTILDYLIDDGYNNRNFMQLINDDGLSFKEIIQKAQVVGKTDDLTQVVRELSGSPAIKKGILQSIKIVDELVKIMGYAPESIVIEMARENQTTAKGKKNSQQRYKRIEDALKNLAPGLDSTISKENPTDNIQLQNDRLFLYYLQNGKDMYTGEALDINQLSSYDIDHIIPQAFIKDDSLDNRVLTSSKDNRGKSDNVPSLEVVKKRKAFWQQLLDSKLISERKFNNLTKAERGGLDERDKVGFIKRQLVETRQITKHVARILDARFNTEVSEKNQKIRSVKIITLKSNLVSNFRKEFKLYKVREINDYHHAHDAYLNAVVAKAILKKYPKLEPEFVYGDYQKYDLKRYISKSKDPKEVEKATEKYFFYSNLLNFFKEEVHYADGTIVKRENIEYSKDTGEIAWNKEKDFVTIKKVLSYPQVNIVKKREVQTGGFSKESILPKGNSDKLIPRKTKDILWDTTKYGGFDSPVIAYSILLIADIEKGKAKKLKTVKTLVGITIMEKAAFEKNPITFLENKGYHNVRKENILCLPKYSLFELENGRRRLLASAKELQKGNEIVLPVYLTTLLYHSKNVHKLDEPEHLEYIQKHRYEFKDLLNLVSEFSQKYVLAEANLEKIKSLYVDNEQADIEILANSFINLLTFTALGAPAAFKFFGKDVDRKRYTTVSEILNATLIHQSITGLYETRIDLSKLGED

SEQ ID NO: 1303 - protein, 1139 aa, Streptococcus sp.
MSDLVLGLDIGIGSVGVGILNKVTGEIIHKNSRIFPAAQAENNLERRTNRQGRRLTRRKKHRRVRLNHLFEESGLITDFTKVSINLNPYQLRVKGLTAELSNEELFIALKNMVKHRGISYLDDASDDGNSSVGDYAQIVKENSKQLETKTPGQIQLERYQKYGQLRGDFTVEEDGRKHRLINVFPTSAYHAEALRILQTQQEFNPQITDEFINSYLEILTGKRKYYHGPGNEKSRTDYGKYTTKKDAQGQYITLNNIFGILIGKCTFYPEEYRAAKASYTAQEFNLLNDLNNLTVPTETKKLSEEQKYQIITYVKNEKAMGPAKLFKYIAKLLSCDVADIKGYRIDKSDKAEIHTFEAYRKMKTLETLDVKKMAREELDKLAYVLTLNTEREGIQEALDHEFADGTFSQEQVDELVQFRKANSSIFGKGWHSFSVKLMMELIPELYATSEEQMTILTRLGKQKTTSSSNKTKYIDEKQLTEEIYNPVVAKSVRQAIKIVNAAIKKYGDFDNIVIEMARETNEDDEKKAIQKIQKANKAEKDAAMRKAANQYNGKAELPHSVFHGHKQLATKIRLWHQQGERCLYTGKTISIHDLINNPNQFEIDHILPLSITFDDSLANKVLVYATANQEKGQRTPYQALDSMDDAWSFRELKAFVRESKALSNKKKEYLLTEEDISKFDVRKKFIERNLVDTRYASRVVLNALQEHFRTHKIDTKVSVVRGQFTSQLRRHWGIEKTRDTYHHHAVDALIIAASSQLNLWKKQKNTLVSYSEDQLLDIETGELISDDEYKESVFKAPYQHFVDTLKSKEFEDSILFSYQVDSKFNRKISDATIYATRKAKLDKEKKEYTYTLGKIKDIYALGTKTPSKTGFYKFLDLYKKDKSQFLMYQKDRRTWDEVIEKILEQYRPFKEKDKNGKEVDFNPFEKYRIENGPIRKYSRKGNGPEIKSLKYYDNLLGRFVDITPSESKNPVALLSLNPWRTDVYYNTETRKYEFLGLKYADLCFEKGGSYGISKVKYNKIREKEGIGKNSEFKFTLYKNDLILIKDTETNRQQIFRFWSRTGKDNPKSFEKHKLELKPYEKTRFEKGEELKVLGKVPPSSNRLQKNMQIENLSIYKVRTDVLGNQHIIKNEGDKPKLDF

SEQ ID NO: 1304 - protein, 1375 aa, Streptococcus sp.
MSNKSYSIGLDIGTNSVGWAVITDDYKVPSKKMKVLGNTDKHFIKKNLIGALLFDEGTTAEDRRLKRTARRRYTRRKNRLRYLQEIFSQEISKVDSSFFHRLDDFFLVPEDKRGSKYPIFATLVEEKEYHKKFPTIYHLRKHLADSKEKTDLRLIYLALAHMIKYRGHFLYEESFDIKNNDIQKIFSEFISIYDNTFEGKSLSGQNAQVEAIFTDKISKSTKRERVLKLFPDEKSTGLFSEFLKLIVGNQADFKKHFDLEEKAPLQFSKDTYDEDLENLLGQIGDDFADLFLVAKKLYDAILLSGILTVKDLSTKAPLSASMIERYENHQKDLAALKQFIQNNLQEKYDEVFSDQSKDGYAGYIDGKTTQEAFYKYIKNLLSKFEGADYFLDKIEREDFLKKQRTFDNGSIPHQIHLQEMNAIIRRQGEHYPFLQENKEKIEKILTFRIPYYVGPLARGNGDFAWLTRNSDQAIRPWNFEEIVDQASSAEDFINKMTNYDLYLPEEKVLPKHSLLYETFAVYNELTKVKFIAEGLTRYQFLDKKQKKDIFDTFFKAENKRKVTEKDIIHYLHNVDGYDGIELKGIEKQFNASLSTYHDLLKIIKDKAFMDDSKNEEILENIIHTLTIFEDREMIKQRLAQYDSLFDEKVIKALTRRHYTGWGKLSAKLINGIRDKKSGKTILDYLIDDGEINRNFMQLIHDDGLSFKEIIQKAQVFGKTNDVKQVVQELPGSPAIKKGILQSIKIVDELVKVMGHAPESIVIEMARENQTTARGKKNSQQRYKRIEDSLKNLASGLDSNILKENPTDNIQLQNDRLFLYYLQNGRDMYTGKPLEINQLSNYDIDHIIPQAFIKDDSLDNRVLTSSKDNRGKSDNVPSLEVVEKMKAFWQQLLDSKLISERKFNNLTKAERERGGLNELDKVGFIKRQLVETRQITKHVAQFLDARFNKEVTEKDKKNRNVKIITLKSNLVSNFRKEFGLYKVREINDYHHAHDAYLNAVLAKAILKKYPKLEPEFVYGDYQKYDLQRYISKSREPKEVEKATQKYFFYSNLLNFFKEEVHYADGTIVKRENIEYSKDTGEIAWNKEKDFATVKKVLSLPQVNIVKKTEVQTGGFSKESILPKGNSDKLIPRKTKEILWDTTKYGGFDSPVIAYSILLIADIEKGKAKKLKTVKTLVGITIMEKATFEKNPITFLENKGYHNVRKENILCLPKYSLFELESGRRRMLASAKELQKGNEIVLPVYLTTLLYHSKNVHKLDEPEHLEYIQKHRYEFKDLLNLVSEFSQKYVLADANLEKIKNLYADNEQADIEILANSFINLLTFTALGAPAAFKFLGKDVDRKRYTTVSEILNATLIHQSITGLYETRIDLSKLGED

SEQ ID NO: 1305 - protein, 206 aa, Streptococcus sp.
RTPFQALDSMDDAWSYREFKSYVKESKLLGNKKKEYLLTEEDISKIEVKQKFIERNLIDTRYSSRVVLNALQDFYKAHKFDTTISVVRGQFTSQLRRKWGLEKSRETYHHHAVDALIIAASSQLRLWKKQNNPLIAYKEGQFVDSETGEIISLSDDEYKELVFKAPYDHFVDTLSSKTFEDSILFSYQVDSKFNRKISDATIYATR

SEQ ID NO: 1306 - protein, 1122 aa, Streptococcus suis
MSNGKILGLDIGIASVGVGVIDAQTGEIIHASSRIFPSANAANNAERRTFRGSRRLIRRKKHRIKRLDDLFNDFHINLDGEMSTDNPYVLRVKGLSQKLTVEELYISIKNIMKRRGISYLDDAESDNEAGRSDYAKAIERNRQLLTSKTPGEIQLERLEKYGQLRGNFTIIDEEGQSQQIINVFSTSDYVKEVEKILDCQKMYHKFISDEFCDKLIELLREKRKYYVGPGNEKSRTDYGIYRTDGTTLENLFGILIGKCTFYPDQYRSSRASYTAQEFNFLNDLNNLTVPTETKKLSQEQKEFLVNYAKETSVLGAGKILQQIAKLADCKVEDIRGYRLDNKDKPELHTFETYRAMKGLVPLVDIGVLSREQLDILADILTLNTDFEGIREALKKQLPNVFDEKQVKGLASFRKSKSQLFAKGWHNLSQKIMLEVIPELYATSDEQMTILTRLGKFEKSSVAEYPSSINVDEITDEIYNPVVAKSIRQTIKIINASIKKWDEFDQIVIEMPRDRNEDEEKKRIADGQKANAKEKADSILRAAELYCAGKVLPDYVYNGHNQLATKIRLWYQQGERCIYTGQPISIHDLIHNQNQYEIDHILPLSLTFDDSLSNKVLVLATANQEKAQRTPYNYLKSATSAWSYREFKDYVTKRKGIGKKKCEYLTFEEDINGFEVRSKFIQRNLVDTRYASKVILNALQDYFKISGIQTKVSVVRGQFTSQLRHKWGIEKTRETYHHHAVDALIIAASSQLRLWKKQESPLVVDYQEGRQVDLETGEILELTDEQYKELVYQPPYQGFVNTISSSAFDNEILFSYQVDSKVNRKISDATIYATRNAQLGKDKTEGIYVLGKIKDIYTQAGYEAFLKRYTKDKTSFLMYHKDLDTWEKVIEIILRDYREYDEKGKEIGNPFERYRRENGYVKKYSRKGNGTAIKSLKYYDNKLGNHIDITPENSRNAVVLQSLKPWRTDVYFNKETGKYEFLGIKYSDLSFEKGTGEYGISQEKYDSIKIAEGVAKKSIFKFTLYKQDLLFIKDIENNFGKLLRFTSKNDTSKHYVELKPYDKNKFGTEEPLLPVLGNVAKSGQCIKGLNKSNISIYKVRTDILGYRHFIKQEGEHPQLKFKK

SEQ ID NO: 1307 - protein, 1381 aa, Streptococcus suis
MVKKKYAIGIDIGTNSVGWSIVTDDYKVPSKKMKVFGNTEKRYIKKNLLGTLLFDEGNTAENRRLKRTARRRYTRRRNRILYLQEIFAEEINKIDDSFFQRLDDSFLIVEDKQGSKHPIFGTLQEEKEYHKQFPTIYHLRKQLADSSQKADIRLIYLALAHIIKYRGHFLFEGDLKSENKDVQHLFNDFVEMFDKTVEGSYLSENLPNVADVLVEKVSKSRRLENILHYFPNEKKNGLFGNFLALALGLQPNFKTNFELAEDAKIQFSKETYEEDLEELLGKIGDDYADLFIATKSLYDGILLAGILSTTDSTTKAPLSSSMVNRYEEHQKDLALLKNFIHQNLSDSYKEVFNDKLKDGYAGYIEGKTTQENFYRFIKKAIEKIEGSNYFIDKIDREDFLRKQRTFDNGSIPHQIHLQEMHAIIRRQAEFYPFLVENQDKIEKILTFRIPYYVGPLARGKSEFAWLNRKSDEKIRPWNFDEMVDKETSAENFITRMTNYDRYLPDQKVLPKHSLLYEKFAVYNELTKVKFIAEGMRDYQFLDSGQKKDIVKTLFKTKRKVTAKDIKAYLENSNGYAGVELKGLEEQFNASLPTYHDLLKILRDKAFIDAEENQEILEDIVLTLTLFEDREMIRKRLEKYKDILTEEQRKKLERRHYTGWGRLSAKLINGILDKVTRKTILGYLIDDGTSNRNFMQLINDDTLSFVDEIRLAQGSGEAEDYRAEVQNLAGSPAIKKGILQSLKIVDELIEVMGYEPEHIVVEMARENQFTNQGRRNSQQRINRLENALKDFGSKILEEQKPYGVSKVNNIHLQSDRLFLYYLQNGKDMYTDEELDIDHLSEYDIDHIIPQAFIKDDSLDNKVLTKSAKNRGKSDDVPSMEIVHNRKNFWRQLLKSKLISQRKFDNLTKAERGGLTNEDKARFIQRQLVETRQITKHVARMLDTRFNTKLDEAGNRIRDPKVNIITLKSNLVSQFRKDYQLYKIREINNYHHAHDAYINAVVATALLKKYPQLAPEFVYGEYPTYNSYNSRKSATEKVLFYSNIMNFFKRIVVHSKTGEVRIRPVIEVNKETGEIVWDKKSDFRTVRKVLSYPQVNVVKKTEVQNHGLDRGKPKGFYNANLSPRPKEGSVENLVPAKQSFDTKRYGGYAGISNSYAVLVNGIIEKGKKKSKAEVTEFQGISILARKDFDKNPKQYLLNLGYKDIKSIIKLPKYSLFELENGSRRMLASILSTNNKRGEIHKGNEMYLPDKFVTLLYHAMRVNRTLEPGHKKYVETHRHVFDELLIYILEYNEKIVGAKANGKRIVEAYSARKDTDNLEELCNSFINLLNLTALGSAVDFEFLGTKIPRYRDYTPSSLLKATLIHQSVTGLYETRIDLSKLGGD

SEQ ID NO: 1308 - protein, 39 aa, Streptococcus thermophilus
GRCIKGLGKSNISIYKVRTDVLGNQHIIKNEGDKPKLDF

SEQ ID NO: 1309 - protein, 302 aa, Streptococcus thermophilus
MIRRKKHRIVRLNRLFEESGLITDFTKISINLNPYQLRVKGLTDELSNEELFIALKNMVKHRGISYLDDASDDGNSSVGDYAQIVKENSKQLETKTPGQIQLERYQTYGQLRGDFTVEKDGKKHRLINVFPTSAYRSEALRILQTQQEFNPQITDEFINRYLEILTGKRKYYHGPGNEKSRTDYGRYRTSGETLDNIFGILIGKCTFYPDEFRAAKASYTAQEFNLLNDLNNLTVPTETKKLSKEQKNQIINYVKNEKAMGPAKLFKYIAKLLSCDVADIKGYRIDKSGKAERFILSKPIEK

SEQ ID NO: 1310 - protein, 1121 aa, Streptococcus thermophilus
MSDLVLGLDIGIGSVGVGILNKVTGEIIHKNSRIFPAAQAENNLVRRTNRQGRRLTRRKKHRIVRLNRLFEESGLITDFTKISINLNPYQLRVKGLTDELSNEELFIALKNMVKHRGISYLDDASDDGNSSVGDYAQIVKENSKQLETKTPGQIQLERYQTYGQLRGDFTVEKDGKKHRLINVFPTSAYRSEALRILQTQQEFNPQITDEFINRYLEILTGKRKYYHGPGNEKSRTDYGRYRTSGETLDNIFGILIGKCTFYPDEFRAAKASYTAQEFNLLNDLNNLTVPTETKKLSKEQKNQIINYVKNEKAMGPAKLFKYIAKLLSCDVADIKGYRIDKSGKAEIHTFEAYRKMKTLETLDIEQMDRETLDKLAYVLTLNTEREGIQEALEHEFADGSFSQKQVDELVQFRKANSSIFGKGWHNFSVKLMMELIPELYETSEEQMTILTRLGKQKTTSSSNKTKYIDEKLLTEEIYNPVVAKSVRQAIKIVNAAIKEYGDFDNIVIEMARETNEDDEKKAIQKIQKANKDEKDAAMLKAANQYNGKAELPHSVFHGHKQLATKIRLWHQQGERCLYTGKTISIHDLINNSNQFEVDHILPLSITFDDSLANKVLVYATANQEKGQRTPYQALDSMDDAWSFRELKAFVRESKTLSNKKKEYLLTEEDISKFDVRKKFIERNLVDTRYASRVVLNALQEHFRAHKIDTKVSVVRGQFTSQLRRHWGIEKTRDTYHHHAVDALIIAASSQLNLWKKQKNTLVSYSEDQLLDIETGELISDDEYKESVFKAPYQHFVDTLKSKEFEDSILFSYQVDSKFNRKISDATIYATRQAKVGKDKADETYVLGKIKDIYTQDGYDAFMKIYKKDKSKFLMYRHDPQTFEKVIEPILENYPNKQMNEKGKEVPCNPFLKYKEEHGYIRKYSKKGNGPEIKSLKYYDSKLGNHIDITPKDSNNKVVLQSVSPWRADIYFNNTTGKYEILGLKYADLQFEKGTGTYKISQEKYNDIKKKEGVDSDSEFKFTLYKNDLLLVKETETKEQQLFRFLSRTMPKQKHYVELKPYDKQKFEGGEALIKVLGNVANGGQCIKGLGKSNISIYKVRTDVLGNQHIIKNEGDKPKLDF

SEQ ID NO: 1311 - protein, 1121 aa, Streptococcus thermophilus
MSDLVLGLDIGIGSVGVGILNKVTGEIIHKNSRIFPAAQAENNLVRRTNRQGRRLTRRKKHRIVRLNRLFEESGLITDFTKISINLNPYQLRVKGLTDELSNEELFIALKNMVKHRGISYLDDASDDGNSSVGDYAQIVKENSKQLETKTPGQIQLERYQTYGQLRGDFTVEKDGKKHRLINVFPTSAYRSEALRILQTQQEFNPQITDEFINRYLEILTGKRKYYHGPGNEKSRTDYGRYRTSGETLDNIFGILIGKCTFYPDEFRAAKASYTAQEFNLLNDLNNLTVPTETKKLSKEQKNQIINYVKNEKAMGPAKLFKYIAKLLSCDVADIKEYRIDKSGKAEIHTFEAYRKMKTLETLDIEQMDRETLDKLAYVLTLNTEREGIQEALEHEFADGSFSQKQVDELVQFRKANSSIFGKGWHNFSVKLMMELIPELYETSEEQMTILTRLGKQKTTSSSNKTKYIDEKLLTEEIYNPVVAKSVRQAIKIVNAAIKEYGDFDNIVIEMARETNEDDEKKAIQKIQKANKDEKDAAMLKAANQYNGKAELPHSVFHGHKQLATKIRLWHQQGERCLYTGKTISIHDLINNSNQFEVDHILPLSITFDDSLANKVLVYATANQEKGQRTPYQALDSMDDAWSFRELKAFVRESKTLSNKKKEYLLTEEDISKFDVRKKFIERNLVDTRYASRVVLNALQEHFRAHKIDTKVSVVRGQFTSQLRRHWGIEKTRDTYHHHAVDALIIAASIQLNLWKKQKNTLVSYSEDQLLDIETGELISDDEYKESVFKAPYQHFVDTLKSKEFEDSILFSYQVDSKFNRKISDATIYATRQAKVGKDKADETYVLGKIKDIYTQDGYDAFMKIYKKDKSKFLMYRHDPQTFEKVIEPILENYPNKQINEKGKEVPVNPFLKYKEEHGYIRKYSKKGNGPEIKSLKYYDSKLGNHIDITPKDSNNKVVLQSVSPWRADVYFNKTTGKYEILGLKYADLQFEKGTGTYKISQEKYNDIKKKEGVDSDSEFKFTLYKNDLLLVKDTETKEQQLFRFLSRTMPKQKHYVELKPYDKQKFEGGEALIKVLGNVANSGQCKKGLGKSNISIYKVRTDVLGNQHIIKNEGDKPKLDF

SEQ ID NO: 1312 - protein, 1121 aa, Streptococcus thermophilus
MSDLVLGLDIGIGSVGVGILNKVTGEIIHKNSRIFPAAQAENNLVRRTNRQGRRLTRRKKHRRVRLNRLFEESGLITDFTKISINLNPYQLRVKGLTDELSNEELFIALKNMVKHRGISYLDDASDDGNSSVGDYAQIVKENSKQLETKTPGQIQLERYQTYGQLRGDFTVEKDGKKHRLINVFPTSAYRSEALRILQTQQEFNPQITDEFVNRYLEILTGKRKYYHGPGNEKSRTDYGRYRTNGETLDNIFGILIGKCTFYPEEFRAAKASYTAQEFNLLNDLNNLTVPTETKKLSKEQKNQIINYVKNEKAMGPAKLFKYIAKLLSCDVADIKGYRIDKSGKAEIHTFEAYRKMKTLETLDIEQMDRETLDKLAYVLTLNTEREGIQEALEHEFADGSFSQKQVDELVQFRKANSSIFGKGWHNFSVKLMMELIPELYETSEEQMTILKRLGKQKTTSSSNKTKYIDEKLLTEEIYNPVVAKSIRQAIKIVNAAIKEYGDFDNIVIEMARETNEDDEKKAIQKIQKANKDEKDAAMLKAANQYNGKAELPHSVFHGHKQLATKIRLWHQQGERCLYTGKTISIHDLINNPNQFEVDHILPLSITFDDSLANKVLVYATANQEKGQRTPYQALDSMDDAWSFRELKAFVRESKTLSNKKKEYLLTEEDISKFDVRKKFIERNLVDTRYASRVVLNALQEHFRAHKIDTKVSVVRGQFTSQLRRHWGIEKTRDTYHHHAVDALIIAASSQLNLWKKQKNTLVSYSEDQLLDIETGELISDDEYKESVFKAPYQHFVDTLKSKEFEDSILFSYQVDSKFNRKISDATIYATRQAKVGKDKKDETYVLGKIKDIYTQDGYDAFMKIYKKDKSKFLMYRHDPQTFEKVIEPILENYPNKEMNEKGKEVPCNPFLKYKEEHGYIRKYSKKGNDPEIKSLKYYDSKLGNHIDITPKDSNNKVVLQSVSPWRADVYFNKTTGKYEILGLKYADLQFEKGTGTYKISQEKYNDIKKKEGVDSDSEFKFTLYKNDLLLVKDTETKEQQLFRFLSRTMPKQKHYVELKPYDKQKFEGGEALIKVLGNVANSGQCKKGLGKSNISIYKVRTDVLGNQHIIKNEGDKPKLDF

SEQ ID NO: 1313 - protein, 1122 aa, Streptococcus thermophilus
MSDLVLGLDIGIGSVGVGILNKVTGEIIHKNSRIFPAAQAENNVERRTNRQGRRLTRRKKHRRVRLNRLFEESGLITDFTKISINLNPYQLRVRGLTDELSNEELFIALKNMVKHRGISYLDDASDDGNSSVGDYAQIVKENSKQLETKTPGQIQLERYQTYGQLRGDFTVEKDGKKHRLINVFPTSAYRSEALRILQTQQEFNSQITDEFINRYLEILTGKRKYYHGPGNEKSRTDYGRYRTSGETLDNIFGILIGKCTFYPEEFRAAKASYTAQEFNLLNDLNNLTVPTETKKLSKEQKNQIINYVKNEKAMGPAKLFKYIAKLLSCDVADIKGYRIDKSGKAEIHTFEAYRKMKTLETLDIEQMDRETLDKLAYVLTLNTEREGIQEALEHEFADGSFSQKQVDELVQFRKASSSIFGKGWHNFSVKLMMELIPELYETSEEQMTILTRLGKQKTTSSSNKTKYIDEKLLTEEIYNPVVAKSVRQAIKIVNAAIKEYGDFDNIVIEMARETNEDDEKKAIQKIQKANKDEKDAAMLKAANQYNGKAELPHSVFHGHKQLATKIRLWHQQGERCLYTGKTISIHDLINNPNQFEVDHILPLSITFDDSLANKVLVYATANQEKGQRTPYQALDSMDDAWSFRELKAFVRESKTLSNKKKEYLLTEEDISKFDVRKKFIERNLVDTRYASRVVLNALQEHFRAHKIDTKVSVVRGQFTSQLRRHWGIEKTRDTYHHHAVDALIIAASSQLNLWKKQKNTLVSYSEDQLLDIETGELISDDEYKESVFKAPYQHFVDTLKSKEFEDSILFSYQVDSKFNRKLSDATIYATRQAKVGKDKKDETYVLGKIKDIYTQDGYDAFMKIYKKDKSKFLMYRHDPQTFEKVIEPILENYPNKEMNEKGKEVPCNPFLKYKEEHGYIRKYSKKGNGPEIKSLKYYDSKLLGNPIDITPENSKNKVVLQSLKPWRADVYFNKTTGKYEILGLKYADLQFEKKTGTYKISQEKYNGIMKEEGVDSDSEFKFTLYKNDLLLVKDTETKEQQLFRFLSRTMPNVKYYVELKPYSKDKFEKNESLIEILGSADKSGRCIKGLGKSNISIYKVRTDVLGNQHIIKNEGDKPKLDF

SEQ ID NO: 1314 - protein, 1388 aa, Streptococcus thermophilus
MTKPYSIGLDIGTNSVGWAVITDNYKVPSKKMKVLGNTSKKYIKKNLLGVLLFDSGITAEGRRLKRTARRRYTRRRNRILYLQEIFSTEMATLDDAFFQRLDDSFLVPDDKRDSKYPIFGNLVEEKAYHDEFPTIYHLRKYLADSTKKADLRLVYLALAHMIKYRGHFLIEGEFNSKNNDIQKNFQDFLDTYNAIFESDLSLENSKQLEEIVKDKISKLEKKDRILKLFPGEKNSGIFSEFLKLIVGNQADFRKCFNLDEKASLHFSKESYDEDLETLLGYIGDDYSDVFLKAKKLYDAILLSGFLTVTDNETEAPLSSAMIKRYNEHKEDLALLKEYIRNISLKTYNEVFKDDTKNGYAGYIDGKTNQEDFYVYLKNLLAEFEGADYFLEKIDREDFLRKQRTFDNGSIPYQIHLQEMRAILDKQAKFYPFLAKNKERIEKILTFRIPYYVGPLARGNSDFAWSIRKRNEKITPWNFEDVIDKESSAEAFINRMTSFDLYLPEEKVLPKHSLLYETFNVYNELTKVRFIAESMRDYQFLDSKQKKDIVRLYFKDKRKVTDKDIIEYLHAIYGYDGIELKGIEKQFNSSLSTYHDLLNIINDKEFLDDSSNEAIIEEIIHTLTIFEDREMIKQRLSKFENIFDKSVLKKLSRRHYTGWGKLSAKLINGIRDEKSGNTILDYLIDDGISNRNFMQLIHDDALSFKKKIQKAQIIGDEDKGNIKEVVKSLPGSPAIKKGILQSIKIVDELVKVMGGRKPESIVVEMARENQYTNQGKSNSQQRLKRLEKSLKELGSKILKENIPAKLSKIDNNALQNDRLYLYYLQNGKDMYTGDDLDIDRLSNYDIDHIIPQAFLKDNSIDNKVLVSSASNRGKSDDFPSLEVVKKRKTFWYQLLKSKLISQRKFDNLTKAERGGLLPEDKAGFIQRQLVETRQITKHVARLLDEKFNNKKDENNRAVRTVKIITLKSTLVSQFRKDFELYKVCEINDFHHAHDAYLNAVIASALLKKYPKLEPEFVYGDYPKYNSFRERKSATEKVYFYSNIMNIFKKSISLADGRVIERPLIEVNEETGESVWNKESDLATVRRVLSYPQVNVVKKVEEQNHGLDRGKPKGLFNANLSSKPKPNSNENLVGAKEYLDPKKYGGYAGISNSFAVLVKGTIEKGAKKKITNVLEFQGISILDRINYRKDKLNFLLEKGYKDIELIIELPKYSLFELSDGSRRMLASILSTNNKRGEIHKGNQIFLSQKFVKLLYHAKRISNTINENHRKYVENHKKEFEELFYYILEFNENYVGAKKNGKLLNSAFQSWQNHSIDELCSSFIGPTGSERKGLFELTSRGSAADFEFLGVKIPRYRDYTPSSLLKDATLIHQSVTGLYETRIDLAKLGEG

SEQ ID NO: 1315 - protein, 1388 aa, Streptococcus thermophilus
MTKPYSIGLDIGTNSVGWAVITDNYKVPSKKMKVLGNTSKKYIKKNLLGVLLFDSGITAEGRRLKRTARRRYTRRRNRILYLQEIFSTEMATLDDAFFQRLDDSFLVPDDKRDSKYPIFGNLVEEKAYHDEFPTIYHLRKYLADSTKKADLRLVYLALAHMIKYRGHFLIEGEFNSKNNDIQKNFQDFLDTYNAIFESDLSLENSKQLEEIVKDKISKLEKKDRILKLFPGEKNSGIFSEFLKLIVGNQADFRKCFNLDEKASLHFSKESYDEDLETLLGYIGDDYSDVFLKAKKLYDAILLSGFLTVTDNETEAPLSSAMIKRYNEHKEDLALLKEYIRNISLKTYNEVFKDDTKNGYAGYIDGKTNQEDFYVYLKNLLAEFEGADYFLEKIDREDFLRKQRTFDNGSIPYQIHLQEMRAILDKQAKFYPFLAKNKERIEKILTFRIPYYVGPLARGNSDFAWSIRKRNEKITPWNFEDVIDKESSAEAFINRMTSFDLYLPEEKVLPKHSLLYETFNVYNELTKVRFIAESMRDYQFLDSKQKKDIVRLYFKDKRKVTDKDIIEYLHAIYGYDGIELKGIEKQFNSSLSTYHDLLNIINDKEFLDDSSNEAIIEEIIHTLTIFEDREMIKQRLSKFENIFDKSVLKKLSRRHYTGWGKLSAKLINGIRDEKSGNTILDYLIDDGISNRNFMQLIHDDALSFKKKIQKAQIIGDEDKGNIKEVVKSLPGSPAIKKGILQSIKIVDELVKVMGGRKPESIVVEMARENQYTNQGKSNSQQRLKRLEKSLKELGSKILKENIPAKLSKIDNNALQNDRLYLYYLQNGKDMYTGDDLDIDRLSNYDIDHIIPQAFLKDNSIDNKVLVSSASNRGKSDDFPSLEVVKKRKTFWYQLLKSKLISQRKFDNLTKAERGGLLPEDKAGFIQRQLVETRQITKHVARLLDEKFNNKKDENNRAVRTVKIITLKSTLVSQFRKDFELYKVREINDFHHAHDAYLNAVIASALLKKYPKLEPEFVYGDYPKYNSFRERKSATEKVYFYSNIMNIFKKSISLADGRVIERPLIEVNEETGESVWNKESDLATVRRVLSYPQVNVVKKVEEQNHGLDRGKPKGLFNANLSSKPKPNSNENLVGAKEYLDPKKYGGYAGISNSFAVLVKGTIEKGAKKKITNVLEFQGISILDRINYRKDKLNFLLEKGYKDIELIIELPKYSLFELSDGSRRMLASILSTNNKRGEIHKGNQIFLSQKFVKLLYHAKRISNTINENHRKYVENHKKEFEELFYYILEFNENYVGAKKNGKLLNSAFQSWQNHSIDELCSSFIGPTGSERKGLFELTSRGSAADFEFLGVKIPRYRDYTPSSLLKDATLIHQSVTGLYETRIDLAKLGEG

SEQ ID NO: 1316 - protein, 595 aa, Streptococcus thermophilus
MVQFRKANSSIFGKGWHNFSVKLMMELIPELYETSEEQMTILKRLGKQKTTSSSNKTKYIDEKLLTEEIYNPVVAKSVRQAIKIVNAAIKEYGDFDNIVIEMARETNEDDEKKAIQKIQKANKDEKDAAMLKAANQYNGKAELPHSVFHGHKQLATKIRLWHQQGERCLYTGKTISIHDLINNPNQFEVDHILPLSITFDDSLANKVLVYATANQEKGQRTPYQALDSMDDAWSFRELKAFVRESKTLSNKKKEYLLTEEDISKFDVRKKFIERNLVDTRYASRVVLNALQEHFRAHKIDTKVSVVRGQFTSQLRRHWGIEKTRDTYHHHAVDALIIAASSQLNLWKKQKNTLVSYSEDQFLDIETGELISDDEYKESVFKAPYQHFVDTLKSKEFEDSILFSYQVDSKFNRKISDATIYATRKAKLDKEKKEYTYTLGKIKDIYTQAGYDAFIKIYKKDKSKFLMYHHDPQTFEKVIEPILENYPNKEINEKGKEVPCNPFLKYKEEHGYIRKYSKKGNGPEIKSFKYYDNLLGRHIDITPKNSKNIVALRKLNPWRTDVYFNHETMKYEFLGLKYADISYKKSKNKAGDFLPK

SEQ ID NO: 1317 - protein, 1388 aa, Streptococcus thermophilus]
MTKPYSIGLDIGTNSVGWAVITDNYKVPSKKMKVLGNTSKKYIKKNLLGVLLFDSGITAEGRRLKRTARRRYTRRRNRILYLQEIFSTEMATLDDAFFQRLDDSFLVPDDKRDSKYPIFGNLVEEKVYHDEFPTIYHLRKYLADSTKKADLRLVYLALAHMIKYRGHFLIEGEFNSKNNDIQKNFQDFLDTYNAIFESDLSLENSKQLEEIVKDKISKLEKKDRILKLFPGEKNSGIFSEFLKLIVGNQADFRKCFNLDEKASLHFSKESYDEDLETLLGYIGDDYSDVFLKAKKLYDAILLSGFLTVTDNETEAPLSSAMIKRYNEHKEDLALLKEYIRNISLKTYNEVFKDDTKNGYAGYIDGKTNQEDFYVYLKNLLAEFEGADYFLEKIDREDFLRKQRTFDNGSIPYQIHLQEMRAILDKQAKFYPFLAKNKERIEKILTFRIPYYVGPLARGNSDFAWSIRKRNEKITPWNFEDVIDKESSAEAFINRMTSFDLYLPEEKVLPKHSLLYETFNVYNELTKVRFIAESMRDYQFLDSKQKKDIVRLYFKDKRKVTDKDIIEYLHAIYGYDGIELKGIEKQFNSSLSTYHDLLNIINDKEFLDDSSNEAIIEEIIHTLTIFEDREMIKQRLSKFENIFDKSVLKKLSRRHYTGWGKLSAKLINGIRDEKSGNTILDYLIDDGISNRNFMQLIHDDALSFKKKIQKAQIIGDEDKGNIKEVVKSLPGSPAIKKGILQSIKIVDELVKVMGGRKPESIVVEMARENQYTNQGKSNSQQRLKRLEKSLKELGSKILKENIPAKLSKIDNNALQNDRLYLYYLQNGKDMYTGDDLDIDRLSNYDIDHIIPQAFLKDNSIDNKVLVSSASNRGKSDDFPSLEVVKKRKTFWYQLLKSKLISQRKFDNLTKAERGGLLPEDKAGFIQRQLVETRQITKHVARLLDEKFNNKKDENNRAVRTVKIITLKSTLVSQFRKDFELYKVREINDFHHAHDAYLNAVIASALLKKYPKLEPEFVYGDYPKYNSFRERKSATEKVYFYSNIMNIFKKSISLADGRVIERPLIEVNEETGESVWNKESDLATVRRVLSYPQVNVVKKVEEQNHGLDRGKPKGLFNANLSSKPKPNSNENLVGAKEYLDPKKYGGYAGISNSFAVLVKGTIEKGAKKKITNVLEFQGISILDRINYRKDKLNFLLEKGYKDIELIIELPKYSLFELSDGSRRMLASILSTNNKRGEIHKGNQIFLSQKFVKLLYHAKRISNTINENHRKYVENHKKEFEELFYYILEFNENYVGAKKNGKLLNSAFQSWQNHSIDELCSSFIGPTGSERKGLFELTSRGSAADFEFLGVKIPRYRDYTPSSLLKDATLIHQSVTGLYETRIDLAKLGEG

SEQ ID NO: 1318 - protein, 1038 aa, Streptococcus vestibularis
MIDELSNEELFIALKNMVKHRGISYLDDASDDGNSSVGDYAQIVKENSKQLETKTPGQIQLERYQKYGQLRGDFTVEEDGKKHRLINVFPTSAYRAEALRILQTQQEFNSQITDEFINRYLEILTGKRKYYHGPGNEKSRTDYGRYRTSGETLDNIFGILIGKCTFYPEEFRAAKASYTAQEFNLLNDLNNLTVPTETKKLSEEQKNQIINYVKNEKAMGPAKLFKYIAKLLSCDIADIKGYRIDKSDKAEIHTFEAYRKMKTLETIDIEKMSREELDKLAYVLTLNTEREGIQEALEHEFVDGNFSQEQIDELVQFRKANSSIFGKGWHNFSVKLMMELIPELYATSEEQMTILTRLGKQKTTSSSNKTKYIDEKLLTEEIYNPVVAKSVRQAIKIVNAAIKEYGDFDNIVIEMARATNEDDEKKAIQKIQKANKDEKDAAMLKAANQYNGKAELPHSVFHGHKQLATKIRLWHQQGERCLYTGKTISIHDLINNPNQFEIDHILPLSITFDDSLANKVLVYATANQEKGQRTPYQALDSMDDAWSFRELKAFVRESKTLSNKKKEYLLTEEDISKFDVRKKFIERNLVDTRYASRVVLNALQEHFRAHKIDTKVSVVRGQFTSQLRRHWGIEKTRDTYHHHAVDALIIAASSQLNLWKKQKNTLVNYSENQLLDIETGELISDDEYKESVFKAPYQHFVDTLKSKEFEDSILFSYQVDSKFNRKISDATIYATRKAKLDKEKKEYTYTLGKIKDIYALGTKTPSKTGFYKFLDLYKKNKSQFLMYQKDRKTWDEVIEKILEQYRPFKEKDKNGKEVDFNPFEKYRIENGPIRKYSRKGNGPEIKSLKYYDNLLGRFVDITPSESKNPVALLSLNPWRTDVYYNTETRKYEFLGLKYADLCFEKGGSYGISKVKYNKIREKEGIGKNSEFKFTLYKNDLILIKDTETNRQQVFRFWSRTGKDNPKRFEKHKIELKPYEKARFEKGEELEVLGKVPPSSNQLQKNMQIENLSIFKVRTDVLGNQHIIKNEGDKPKLDF

SEQ ID NO: 1319 - protein, 97 aa, Streptococcus vestibularis
MSDLVLGLDIGIGSVGVGILNKVTGEIIHKNSRIFPAAQAENNVERRTNRQGRRLTRRKKHRRVRLNHLFEESGLITDFTKVSINLNPYQLRVKIDR

SEQ ID NO: 1320 - protein, 1084 aa, Subdoligranulum sp.
MKNTLYGIGLDIGVASVGWAVVGLNGTGEPVGLHRLGVRIFDKAEQPKTGESLAAPRRMARGMRRRLRRKALRRADVYALLERSGLSTREELAQMFEAGGLEDIYALRTRALDEPVGKAEFSRILLHLAQRRGFKSNRRTASDGEDGRLLAAVNENRRRMAQGGWRTVGEMLYRHEAFALHKRNKADDYLSTVGRDMVAEEASILFERQRAMGCSWAAPELQAEYLSILLRQRSFDEGPGGNSPYGGNQVEKMVGRCTFEPDEPRAAKAAYSFEYFSLLQKLNHIRLAENGETRPLTQPQRQQLLSLAHKTPDISLARIRKELALPETVQFNGVRCRANETLEESEKKEKFACLPAYHKMRKALDGVVKGRISSLSISQRDAAATALSLYKNEDTLRAKLTEAGFQAPEIDALAGLTGFSKFGHLSLKACRKLIPHLEQGLTYDQACTAAGYDFKGHGAGERAFTLPAAAPEMEQITSPVVRRAVAQTIKVVNGIIREMDASPAWVRIELARELSKTFGERQEMDRSMRENAAQNERLMQELRDTFHLLSPTGQDLVKYRLWKEQDGVCAYSLRRLDVERLFEPGYVDVDHIVPYSLSFDDRRSNKVLVLSSENRQKGNRLPLQYLQGKRREDFIVWTNSSVHDYRKRQNLLREKLSGDEAEGFRQRNLQDTQHMARFLYNYISDHLAFAQSEALGKKRVFAVSGAVTSHLRKRWGLSKVRADGDLHHALDAAVVACTTDGMIRRISGYYGHIEGEYLQDADGAGSQHARTKERFPAPWPRFRDELIVRLSEQPAEPLLDINPEFYCEYGTEHIRPVFVSRMPRRKVTGPGHKETIKGAAAADEGLLTVRKALTELKLDKDGEIKDYYMPSSDTLLYEALKAQLRRFGGDGKKAFAEPFYKPKADGTPGPLVRKVKTTEKATLTVPVHGGAASNDTMVRVDVFLVPGDGYYWVPVYTADTLKPELPNRAVVQGKPYSEWKEMREEDFIFSLYPNDLVYVEHKSGLKFTLQNADSTLEKTRTQTSAFAYFVSGSISTASITIRTHDNAYGIPSLGVKTLKTFHKYQVDVLGNVFPVHKETRQKFR

SEQ ID NO: 1321 - protein, 951 aa, Sutterella parvirubra
MPTVRPVFHSSASFDLGAKNTGLFLVNHPAGAAPSAEYAAAYTIVQPADGDGLNYSTTNRRAVRHRLRGGKRFKLARRLVLQVIDALRKLKPGLIRDEEMRRTVEALSSLLKRRGFTRIESEAQVDPTTLDSVDPAVFADHETLGGFFSLGIPISTQWDALSQNPGAVEQLFKALPSAKDFGKYVTEQFPEFAEQKKLYADAIKVLSSEAKSIVMQLGLGHHHRSKYFEMIAHDMLRDPRLQGVFELFGSEERFKTFICNVSNLQLRALRWYFDEPNPEVANQWNPEKFQVVWLRGLKYFHPDAERKADMKKLIDELTASKDILDALCTTDPRRTIPPYEDQNNRRPPFDQTLWLSAAELTRRYGDKWRIWSQKFERADRALSTGLDEILLYTDRRSRMFNRNQDPSVYADSYVLQRVLDRSSKLDRYALRALAAGYRTQELHEPLATLSDTLGTQHVETFLTFAAEYYEEVAAAKNGLWLDGPSRLLERADIHPPMKKKVLDLLLGNILDATPEIGRILRTVLWNRHVHEKSRSTPASLCRSIEAIRKDFGGEFRMRYDALDAKIRAAEDQKKKFKPTNAEEKDLFKAWNATKTMHAFLRDVLQLTPKQLERTASPYVFAQLHTLIDTERDGFTSTSLAAHLENHWRMRANAAGMAQCSRLPADAVRPFDGVLSKALDRQAFEAAKLAAQHLMSRKELTDTDIRYSIIIESNRFAFSASTAELKKNTLAKKNAEKGLNFELKRWQDKDSRIREASRGICAYTGAKLGDVVEYDHIIPRAFTTSAMGSVFNSEANLICVSRPGNQTKADKRYGLNKLHKTYLTAVFGTADVTTIAASIEDIVGKLASANRLRHFELLNEKEQDAVRHALFLDDESDARRIVLRELAAQNKSRVNGTQAWFVRAFMTKLLEITKDWRERTGNTLDIRSWKTDAEVASRLRSALNFHAEITLT

SEQ ID NO: 1322 - protein, 406 aa, Sutterella parvirubra
SNLFREEVPYGDHFLPIIQMKNRIYIGYQLPKADGTGGNAVAVLGKDPLELLETLKPFLDREPQAFSDHPVTYKMINERAYELLTKCALTPDQTTELERTQAEVLRSLNYQTSRAAVLGRLVDDKNKFVAKDAVWKEKDFVISFKLSPKKSAFKASGQLELPAKSDWKALVDSPELAINWGQPADDTFSQRIERKVRMNSSHLEHTPKKRVVSLPVVDKPSGGFRIRRHNLDGSAVFQVHTVANNKYGGFSADSAGKVDWSTPVLCGHLQHANLVPLDPETASAEQLVRMSEWRVVETTSDIRLEVCPGTSGRRYVRVELPFTLLQEWLTAGKVADVPVSPLHLPGSIKLTDPKTFCAEAQKTLSIFAQPRATIFFEQLGDRVRFRFEASGGPATMNAAYNAAGRS

SEQ ID NO: 1323 - protein, 389 aa, Sutterella wadsworthensis
MKACDLEEKTNHLQACVAIDLGARYTGTFSILHKSSHLPSKDDCRAATYVLPEDGGKMTYSQRNRTAVRHRIRGKKRFALARRMAMLIIREKLAAKSVTLTSSETRRLAEAVGSLLRRRGYNRLETETDNDLTVLENIEPEVFSEHEILGKYFYAGTDLAIQWETLSQDLSKISSLLAERLSEKDFKKYLTGLIPDDKNKIKHIISVFKMLIDEAESINMQCVLGHKHRTQYLSDIHADMHRDTRLSKAAEAFGGVDRLWRLLGNLSNLQLRAHRWYFNAPHLFDDQALEPARLQKTLVRAFKYLHCPQGVESRAQAELVKELEEADDIIDALCTIDPVRTIPPYENQQNRRPPFDQTLYLSPDLGVSGFLCLGRLFQGQPNEAALCFL

SEQ ID NO: 1324 - protein, 976 aa, Tannerella sp.
MKKILGLDLGSNSIGWALVNEAENRDEASSIIKLGVRVNPLTVDEMQNFEKGKSITTNADRTLKRSMRRNLQRYKLRRDALIKLLKKVGFITDGTILSEQGNRTTFETYRLRAKAPDEEISLQELARVLLMINKKRGYKSSRKIKEKEAGTLIDGMEVAKKLYDEDLTPGQLCLQLLESGKKSLPDFYSSDLQEEFDRIWNFQKQFNPKAFCDTAKEEIKGKNKSQTWAILAKYFIWMEEMDVWNEKESKTERVEKECKLVGLKRTVKKEEQRKENYCWRVQALTEQLDLEKVAVVLQEINGQISTSSGYLGAISDRSKVLYFNRQTVGQYQMAELEKNPNTSLRNMVFYRQDYLDEFDKIWEKQAEFHKELTVELKKEIRDIIIFYQRRLKSQKGLIGFCEFENREIMVEKNGKMQAKVVGCKVIPRSHPLFQEFKIWQTLNNVEVFAGEKKCKRKRTDAFPGLFDGTEDTLMVEGWRYLYQEEKEILAKELSVKKSLKKEYILKLLFDNPQDLDMNFEQIEGNDTGNVLFSAYSKMIEKYGYEPLDFGKPTDKIIEQLQVIFADLGWNTDLLFVDLNKEGKDLEKQPYFKLWHLLYSFEGDNTPTGNGKLVEKLMELCHVGKECALELVNISFQNDYGSLSAKAIKKILPYLKEGNRYDVACGYAGYRHSKSSLTKEEIENKVLKDKLDILPKNSLRNPVVEKILNQMVNVINAIIDTYGKPDEIRVELARELKKSAKEREELTKAIAKSTREHEEIRKVLQEEFGMINVSRNDIIRYKLYKELKDNGYKTLYSNQDIPKEKVFSKEIDIEHIIPQARLFDDSLSNKTLEYKAINIEKGNKTAYDFVKEKYGEKGLQQYLNRCESLFKGHRTKLRKLKMGQENIPEGFIDRDLRNTQYIAKKALAMLNEICRRVVATTGSITDRLREDWQLVDVLKELRCFRYFKDTKMKANHNKNIFYTSIKVDVSDTSKILK

SEQ ID NO: 1325 - protein, 1049 aa, Tistrella mobilis
MINERLTFGIDLGIGSCGWAVLRHADAAGEPGVIEGLGSWCFDVPETSKERIPTNQVRRSNRLLRRVIRRRRNRMAEIRRLFHAQGLLPSADEDALKRPRLDPWELRARGLDQCLSAEEFAVALGHIARHRGFRSSAKRKAANTSGEDSKMLSALLVTRERTARYRTVGEMFARDPEYSARRRNRDGIFDRTVARDDLIHEVGKLFEAQRARGSAFASPDLEADFNAIAFRQAEMQDSERLVGNCPFERDEKRAARWAPSFERFRLLTRLINLRIATAEGERRFTPEDLARVSAELGATAKLPVSRVRALIGLLPDERFTTIRVEDEDRDIVARTGEAAPGTWRLRKTLGEALWAEMQARPDQLDAIAHVLSFFEATAKIRSELDRLGLPAAVIEALDRGLEDGAFAKFKGAGHISAKACRNLLPHLQQGHRYDQACRLAGYDHAASTLSHTAQVVSKAGFNALVTELGESIANPIARKALTEGLKQIRAMCARWGLPGAIHIELAREVGNSIEKRRELESQRETTTKRRQTERDEIRGLLALEDVDDDTLLRYRLWKEQGGKCLYTGKDIHVRQLIATDNSVQVDHILPWSRFGDDSFNNKTLCLASANQRKRGQTPWEWFSLTGTPEAWEVFASRVETSKDLRGFKKRNLLLKNADEVAQRFRSRNLNDTRYAARLLAEAAKLFYPAGDRQEKDGRRRVLTRPGPLTAALRHAWGLESLKKADGKRVSDDRHHALDALAVAAISEREVQRLTRSFQEWEQQGLARPLRHVAPPWPGFRGDVLAAYAQAFVARPERRRARGKGHDASIRQVVGEGPEAQVFERRGLADLKEADLDRVKDPERNQAIIEAVRAWILAGRPADAPPRSPRGDVIVKLRTAPAKKIKPAVPVRGGTADRGDMVRIDVFTRPNRKGRDEWYLVPIYPHQVMNRKAWPHPPMRSVVAYKDEAGWTEIGAEHSFRFSLYPRSYVQLVKSNGDVIEGYLVSMDRSTGAFRVFVHNNPAEMAKGIGAKTLLNLRKFNVDRFGVRTEVKSEVRTWHGEVCTSPVPPD

SEQ ID NO: 1326 - protein, 1395 aa, Treponema denticola
MKKEIKDYFLGLDVGTGSVGWAVTDTDYKLLKANRKDLWGMRCFETAETAEVRRLHRGARRRIERRKKRIKLLQELFSQEIAKIDEGFFQRMKESPFYAEDKTILQENALFNDKDFTDKTYHKAYPTINHLIKAWIENKVKPDPRLLYLACHNIIKKRGHFLFEGDFDSENQFDTSIQALFEYLREDMEVDIDADSQKVKEILKDSSLKNSEKQSRLNKILGLKPSDKQKKAITNLISGNKINFADLYDNPDLKDAEKNSISFSKDDFDALSDDLASILGDSFELLLKAKAVYNCSVLSKVIGDEQYLSFAKVKIYEKHKTDLTKLKAVIKKHFPNNYKKVFGYNQDNESKNNYSGYVGVCKTKNKKLVINNSVNQEDFYKFLKPILSAKSEIKEVNDILAEIETGNFLPKQISKSNAEIPYQLRKMELEKILSNAEKHFSFLKQKDEKGLSHSEKIIMLLTFKIPYYIGPINDNHKKSFPDRCWVVKKEKSPSGKTTPWNFFDHIDKEKTAEEFITSRTNFCTYLIGESVLPKNSLLYSEYTVLNEINNLQIIIDGKNICDTKLKQKIYEDLFKKYKKITQKQISTFIKHEGICNKTDEVIILGIDKECTSSLKSYIELKNIFGKQVDEISTKNMLEEIIRWATIYDEGEGKTILKTKIKAEYGKYCSDEQIKKILNLKFSGWGRLSRKFLETVTSEMPGFSEPVNIITAMRETQNNLMELLSSEFKFTENIKKINSGFEDAEKQFSYDGLVKPLFLSPSVKKMLWQTLKLVKEISHITQAPPKKIFIEMAKGAELEPARTKTRLKILQDLYSSCKNDADAFSSEIQYLSGKIENEDNLRLRSDKLYLYYTQLGKCMYCGKPIEIGHVFDTSNYDIDHIYPQSKIKDDSISNRVLVCSSCNKNKEDKYPLKSEIQSKQRGFWNFLQRNNFISLEKLNRLTRTTPISDDETAKFIARQLVETRQATKVAAKVLEKMFPETKIVYSKAETVSMFRNKFDIIKCREINDFHHAHDAYLNIVVGNVYNTKFTNNPWNFIKEKRDNPKIADTYNYYKVFDYDVKRNNITAWEKGKTIITVKDMLKRNTPIYTRQAACKKGGLFDQTIMKKGLGQHPLKKEGPFSNISKYGGYNKVSAAYYTLIEYEEKGNKIRSLETIPLYLVKDIQKDQDVLKSYLTDLLGKKEFKILVPKIKINSLLKINGFPCHITGKTNDSFLLRPAVQFCCSNDEVLYFKKIIRFSEIRSQREKIGKTISPYEDLSFRSYIKENLCKKTKNDEIGEKEFYDLLQKKNLEIYDMLLTKHKDTIYKKRPNSATIDILVKGKEKFKSLIIENQFEVILEILKLFSATRNVSELQHIGGSKYSGVAKIGNKISSLDNCILIYQSITGIFEKRIDLLKV

SEQ ID NO: 1327 - protein, 769 aa, Treponema denticola
MKKEIKDYFLGLDVGTGSVGWAVTDTDYKLLKANRKDLWGMRCFETAETAEVRRLHRGARRRIERRKKRIKLLQELFSQEIAKIDEGFFQRMKESPFYAEDKTILQENALFNDKDFTDKTYHKAYPTINHLIKAWIENKVKPDPRLLYLACHNIIKKRGHFLFEGDFDSENQFDTSIQALFEYLREDMEVDIDADSQKVKEILKDSSLKNSEKQSRLNKILGLKPSDKQKKAITNLISGNKINFADLYDNPDLKDAEKNSISFSKDDFDALSDDLASILGDSFELLLKAKAVYNCSVLSKVIGDEQYLSFAKVKIYEKHKTDLTKLKAVIKKHFPNNYKKVFGYNQDNESKNNYSGYVGVCKTKNKKLVINNSVNQEDFYKFLKPILSAKSEIKEVNDILAEIETGNFLPKQISKSNAEIPYQLRKMELEKILSNAEKHFSFLKQKDEKGLSHSEKIIMLLTFKIPYYIGPINDNHKKSFPDRCWVVKKEKSPSGKTTPWNFFDHIDKEKTAEEFITSRTNFCTYLIGESVLPKNSLLYSEYTVLNEINNLQIIIDGKNICDTKLKQKIYEDLFKKYKKITQKQISTFIKHEGICNKTDEVIILGIDKECTSSLKSYIELKNIFGKQVDEISTKNMLEEIIRWATIYDEGEGKTILKTKIKAEYGKYCSDEQIKKILNLKFSGWGRLSRKFLETVTSEMPGFSEPVNIITAMRETQNNLMELLSSEFKFTENIKKINSGFEDAEKQFSYDGLVKPLFLSPSVKKCCGRL

SEQ ID NO: 1328 - protein, 1395 aa, Treponema denticola
MKKEIKDYFLGLDVGTGSVGWAVTDTDYKLLKANRKDLWGMRCFETAETAEVRRLHRGARRRIERRKKRIKLLQELFSQEIAKIDEGFFQRMKESPFYAEDKTILQENALFNDKDFTDKTYHKAYPTINHLIKAWIENKVKPDPRLLYLACHNIIKKRGHFLFEGDFDSENQFDTSIQALFEYLREDMEVDIDADSQKVKEILKDSSLKNSEKQSRLNKILGLKPSDKQKKAITNLISGNKINFADLYDNPDLKDAEKNSISFSKDDFDALSDDLASILGDSFELLLKAKAVYNCSVLSKVIGDEQYLSFAKVKIYEKHKTDLTKLKAVIKKHFPNNYKKVFGYNQDNESKNNYSGYVGVCKTKNKKLVINNSVNQEDFYKFLKPILSAKSEIKEVNDILAEIETGNFLPKQISKSNAEIPYQLRKMELEKILSNAEKHFSFLKQKDEKGLSHSEKIIMLLTFKIPYYIGPINDNHKKSFPDRCWVVKKEKSPSGKTTPWNFFDHIDKEKTAEEFITSRTNFCTYLIGESVLPKNSLLYSEYTVLNEINNLQIIIDGKNICDTKLKQKIYEDLFKKYKKITQKQISTFIKHEGICNKTDEVIILGIDKECTSSLKSYIELKNIFGKQVDEISTKNMLEEIIRWATIYDEGEGKTILKTKIKAEYGKYCSDEQIKKILNLKFSGWGRLSRKFLETVTSEMPGFSEPVNIITAMRETQNNLMELLSSEFKFTENIKKINSGFEDAEKQFSYDGLVKPLFLSPSVKKMLWQTLKLVKEISHITQAPPKKIFIEMAKGAELEPARTKTRLKILQDLYSSCKNDADAFSSEIQYLSGKIENEDNLRLRSDKLYLYYTQLGKCMYCGKPIEIGHVFDTSNYDIDHIYPQSKIKDDSISNRVLVCSSCNKNKEDKYPLKSEIQSKQRGFWNFLQRNNFISLEKLNRLTRTTPISDDETAKFIARQLVETRQATKVAAKVLEKMFPETKIVYSKAETVSMFRNKFDIIKCREINDFHHAHDAYLNIVVGNVYNTKFTNNPWNFIKEKRDNPKIADTYNYYKVFDYDVKRNNITAWEKGKTIITVKDMLKRNTPIYTRQAACKKGELFNQTIMKKGLGQHPLKKEGPFSNISKYGGYNKVSAAYYTLIEYEEKVNKIRSLETIPLYLVKDIQKDQDVLKSYLTDLLGKKEIKILVPKIKINSLLKINGFPCHITGKTGDSFVLRPAVQFCCSNDEVLYFKKIIRFNEIRSQREKMGKTISPYEDLSFRSYIKENLCKKTKADEIGEKEFYDLLQKKNLEIYDMLLTKHKDTIYNKRPNSTTLGMLTKGRYEFINLKPKDQIIVMLEILKLFCTTREAIDLGLIKGKPAAGVATLGKKISNLDNCILIYQSITGIFEKRIDLLKV

SEQ ID NO: 1329 - protein, 1395 aa, Treponema denticola
MKKEIKDYFLGLDVGTGSVGWAVTDTDYKLLKANRKDLWGMRCFETAETAEVRRLHRGARRRIERRKKRIKLLQELFSQEIAKIDEGFFQRMKESPFYAEDKTILQENTLFNDKDFTDKTYHKAYPTINHLIKAWIENKVKPDPRLLYLACHNIIKKRGHFLFEGDFDSENQFDTSIQALFEYLREDMEVDIDADSQKVKEILKDSSLKNSEKQSRLNKILGLKPSDKQKKAITNLISGNKINFADLYDNPDLKDAEKNSISFSKDDFDALSDDLASILGDSFELLLKAKAVYNCSVLSKVIGDEQYLSFAKVKIYEKHKTDLTKLKNVIKKHFPKDYKKVFGYNKNEKNNNNYSGYVGVCKTKSKKLIINNSVNQEDFYKFLKTILSAKSEIKEVNDILTEIETGTFLPKQISKSNAEIPYQLRKMELEKILSNAEKHFSFLKQKDEKGLSHSEKIIMLLTFKIPYYIGPINDNHKKSFPDRCWVIKKEKSPSGKTTPWNFFDHIDKDKTAEAFITSRTNFCTYLVGESVLPKSSLLYSEYTVLNEINNLQIIIDGKNICDIKLKQKIYEELFKKYKKITQKQISTFIKHEGICNKTDEVIILGIDKECTSSLKSYIELKNIFGKQVDEISTKNMLEEIIRWATIYDEGEGKTILKTKIKAEYGKYCSDEQIKKILNLKFSGWGRLSRKFLETVTSEMPGFSEPVNIITAMRETQNNLMELLSSEFKFTENIKKINSGFEDAEKQFSYNGLVKPLFLSPSVKKMLWQTLKLVKEISHITQAPPKKIFIEMAKGAELEPARTKTRLKILQDLYNNCKNDADAFSSEIKDLSGKIENEDNLRLRSDKLYLYYTQLGKCMYCGKPIEIGHVFDTSNYDIDHIYPQSKIKDDSISNRVLVCSSCNKNKEDKYPLKSEIQSKQRGFWNFLQRNNFISLEKLNRLTRTTPISDDETAKFIARQLVETRQATKVAAKVLEKMFPETKIVYSKAETVSMFRNKFDIIKCREINDFHHAHDAYLNIVVGNVYNTKFTNNPWNFIKEKRDNPKIADTYNYYKVFDYDVKRNNITAWEKGKTIITVKDMLKRNTPIYTRQAACKKGGLFDQTIMKKGLGQHPLKKEGAFSNISKYGGYNKVSAAYYTLIEYEEKGNKIRSLETIPLYLVKDIQKDQDVLKSYLTDLLGKKEIKILVPKIKINSLLKINGFPCHITGKTGDSFVLRPAVQFCCSNDEVLYFKKIIRFNEIRSQREKMGKTISPYEDLSFRSYIKENLCKKTKADEIGEKEFYDLLQKKNLEIYDMLLTKHKDTIYNKRPNSTTLGMLTKGRYEFINLKPKDQIIVMLEILKLFCTTREAIDLGLIKGKPAAGVATLGKKISNPDNCILIYQSITGIFEKRIDLLKV

SEQ ID NO: 1330 - protein, 1395 aa, Treponema denticola
MKKEIKDYFLGLDVGTGSVGWAVTDTDYKLLKANRKDLWGMRCFETAETAEVRRLHRGARRRIERRKKRIKLLQELFSQEIAKIDEGFFQRMKESPLYAEDKTILQENTLFNDKDFTDKTYHKAYPTINHLIKAWIENKVKPDPRLLYLACHNIIKKRGHFLFEGDFDSENQFDTSIQALFEYLREDMELDIDADSQKVKEILKDSSLKNSEKQSRLNKMLGLKPSDKQKKAITNLISGNKINFADLYDNPDLKDAEKNSISFSKDDFDALSDDLASILGDSFELLLKAKAVYNCSVLSKVIGDEQYLSFAKVKIYEKHKTDLTKLKNVIKKHFPKDYKKVFGYNKNEKNNNNYSAYVGVCKITHKKLVIKNSASQEDFYKFLKTILSAKSEIKEVNDILTEIETGTFLPKQISKSNAEIPYQLRKMELEKILSNAEKHFSFLKQKDEKGLSHSEKIIMLLTFKIPYYIGPINDNHKKSFPDRCWVVKKEKSPSGKTTPWNFFDHIDKEKTAEEFITSRTNFCTYLIGESVLPKSSLLYSEYTVLNEINNLQIIIDGKNICDIKLKQKIYEELFKKYKKITQKQISTFIKHEGICNKTDEVIILGIDKECTSSLKSYIELKNIFGKQVDEISTKNMLEEIIRWATIYDEGEGKTILKTKIKAEYGKYCSDEQIKKILNLKFSGWGRLSRKFLETVTSEMPGFSEPVNIITAMRETQNNLMELLSSEFKFTENIKKINSGFEDAEKQFSYNGLVKPLFLSPSVKKMLWQTLKLVKEISHITQAPPKKIFIEMAKGAELEPARTKTRLKILQDLYSSCKNDADAFSSEIQYLSGKIENEDNLRLRSDKLYLYYTQLGKCMYCGKPIEIGHVFDTSNYDIDHIYPQSKIKDDSISNRVLVCSSCNKNKEDKYPLKAEIQSKQRGFWNFLQRNNFISLEKLNRLTRTSPISDDETAKFIARQLVETRQATKVAAKVLEKMFPETKIVYSKAETVSMFRNKFDIIKCREINDFHHAHDAYLNIVVGNVYNTKFTNNPWNFIKEKRDNPKIADTYNYYKVFDYDVKRNNITAWEKGKTIITVKDMLKRNTPIYTRQAACKKGELFNQTIMKKGLGQHPLKKEGPLSNISKYGGYNKVSAAYYTLIEYEEKGSKIRSLETIPLYLVKDIQKNKDGLKSYLTDQIGKKEIKILIPKIKINSLLKINGFPCHITGKMGEAFVLRPAVQFCCSNDEALYFKKIIRFNEIRKQREKMGKTISPYEDLSFRSYIKDNLCKKTKADEIEEKEFYDLLQKKNLEIYDMLLTKHKDTIYKKRPNSATIDILVKGKEKFKSLIIENQFEVILEILKLFSATRNVSDLQHIGGSKNAGNARVGNKISSLDNCILIYQSITGIFEKRIDLLKI

SEQ ID NO: 1331 - protein, 1395 aa, Treponema denticola
MKKEIKDYFLGLDVGTGSVGWAVTDTDYKLLKANRKDLWGMRCFETAETAEVRRLHRGARRRIERRKKRIKLLQELFSQEIAKIDEGFFQRMKESPLYAEDKTILQENTLFNDKDFTDKTYHKAYPTINHLIKAWIENKVKPDPRLLYLACHNIIKKRGHFLFEGDFDSENQFDTSIQALFEYLREDMEVDIDADSQKVKEILKDSSLKNSEKQSRLNKMLGLKPSDKQKKAITNLISGNKINFADLYDNPDLKDAEKNSISFSKDDFDALSDDLASILGDSFELLLKAKAVYNCSVLSKVIGDEQYLSFAKVKIYEKHKTDLTKLKNVIKKHFPKDYKKVFGYNKNEKNNNNYSGYVGVCKTKSKKLIINNSVNQEDFYKFLKTILSAKSEIKEVNDILTEIETGTFLPKQISKSNAEIPYQLRKMELEKILSNAEKHFSFLKQKDEKGLSHSEKIIMLLTFKIPYYIGPINDNHKKSFPDRCWVVKKEKSPSGKTTPWNFFDHIDKEKTAEEFITSRTNFCTYLIGESVLPKNSLLYSEYTVLNEINNLQIIIDGKNICDTKLKQKIYEELFKKYKKITQKQISTFIKHEGICNKTDEVIILGIDKECTSSLKSYIELKNIFGKQVDEISTKNMLEEIIRWATIYDEGEGKTILKTKIKAEYGKYCSDEQIKKILNLKFSGWGRLSRKFLETVTSEMPGFSEPVNIITAMRETQNNLMELLSSEFKFTENIKKINSGFEDVEKQFSYDGLVKPLFLSPSVKKMLWQTLKLVKEISHITQAPPKKIFIEMAKGAELDPVRTKTRLKILQDLYNNCKNDADAFSSEIKDLSGKIENEDNLRLRSDKLYLYYTQLGKCMYCGKPIEIGHVFDTSNYDIDHIYPQSKIKDDSISNRVLVCSSCNKNKEDKYPLKAEIQSKQRGFWNFLQRNNFISLEKFNRLTRATPISDDETAKFIARQLVETRQATKVAARVLEKMFPETKIVYSKAETVSMFRNKFDIVKCREINDFHHAHDAYLNIVVGNVYNTKFTNNLWNFIKEKRDNPKIADTYNYYKVFDYDVKRNNITAWEKGKTIITVKDMLKRNTPIYTRQAACKKGGLFDQTIMKKGLGQHPLKKEGPFSNISKYGGYNKVSAAYYTLIEYEEKGNKIRSLETIPLYLVKDIQKDQDVLKSYLTDLLGKKEFKILVPKIKINSLLKINGFPCHITGKTNDSFLLRPAVQFCCSNDEVLYFKKIIRFSEIRSQREKIGKTISPYEDLSFRSYIKENLCKKTKNDEIGEKEFYDLLQKKNLEIYDMLLTKHKDTIYKKRPNSATIDILVKGKEKFKSLIIENQFEVILEILKLFSATRNVSDLQHIGGSKYSGVAKIGNKISSLDNCILIYQSITGIFEKRIDLLKV

SEQ ID NO: 1332 - protein, 357 aa, Treponema denticola
MKKEIKDYFLGLDVGTGSVGWAVTDTDYKLLKANRKDLWGMRCFETAETAEVRRLHRGARRRIERRKKRIKLLQELFSQEIAKTDEGFFQRMKESPFYAEDKTILQENALFNDRDFTDKTYHKAYPTINHLIKAWIENKVKPDPRLLYLACHNIIKKRGHFLFEGDFDSENQFDTSIQAFFEYLREDMEVDIDADSQKIKEILKDSSLKNSEKQSRLNKILGLKSSDKQKKAITNLISGNKINFADLYDNPDLKDAEKNSISFSKDDFDALSDDLASILGDSFELLLKAKAVYNCSVLSKVIGDEQYLSFAKVKIYEKHKTDLTKLKNVIKKHFPKDYKKVFGYNKNEKITTITPDM

SEQ ID NO: 1333 - protein, 1395 aa, Treponema denticola
MKKEIKDYFLGLDVGTGSVGWAVTDTDYKLLKANRKDLWGMRCFETAETAEVRRLHRGARRRIERRKKRIKLLQELFSQEIAKTDEGFFQRMKESPFYAEDKTILQENALFNDRDFTDKTYHKAYPTINHLIKAWIENKVKPDPRLLYLACHNIIKKRGHFLFEGDFDSENQFDTSIQALFEYLREDMEVDIDADSQKVKEILKDSSLKNSEKQSRLNKMLGLKPSDKQKKAITNLISGNKINFADLYDNPDLKDAEKNSISFSKDDFDALSDDLASILGDSFELLLKAKAVYNCSVLSKVIGDEQYLSFAKVKIYEKHKTDLTKLKNVIKKHFPNDYKKVFGYNKNEKNNNNYSAYVGVCKTKSKKLVINNTVNQEDFYKFLKPILLAKSEIKEVNDILTEIETGTFLPKQISKSNAEIPYQLRKMELEKILSNAEKHFSFLKQKDEKGLSHSEKIIMLLTFKIPYYIGPINDNHKKSFPDRCWVIKKEKSPSGKTTPWNFFDHIDKDKTAEAFITSRTNFCTYLVGESVLPKNSLLYSEYTVLNEINNLQIIIDGKNICDIKLKQKIYEELFKKYKKITQKQISTFIKHEGICNKTDEVIILGIDKECTSSLKSYIELKNIFGKQVDEISTKNMLEEIIRWATIYDEGEGKTILKTKIKAEYGKYCSDEQIKKILNLKFSGWGRLSRKFLETVTSEMPGFSEPVNIITAMRETQNNLMELLSSEFKFTENIKKINSGFEDVEKQFSYDSLVKPLFLSPSVKKMLWQTLKLVKEISHITQAPPKKIFIEMAKGAELDPVRTKTRLKILQDLYNNCKNDADAFSSEIKDLSGKIENEDNLRLRSDKLYLYYTQLGKCMYCGKPIEIGHVFDTSNYDIDHIYPQSKIKDDSISNRVLVCSSCNKNKEDKYPLKAEIQSKQRGFWNFLQRNNFISLEKLNRLTRTSPISDDETAKFIARQLVETRQATKVAAKVLEKMFPETKIVYSKAETVSMFRNKFDIIKCREINDFHHAHDAYLNIVVGNVYNTKFTNNPWNFIKEKRDNPKIADTYNYYKVFDYDVKRNNITAWEKGKTIITVKDMLKRNTPIYTRQAACKKGELFNQTIMKKGLGQHPLKKEGPLSNISKYGGYNKVSAAYYTLIEYEEKGSKIRSLETIPLYLVKDIQKNKDGLKSYLTDQIGKKEIKILIPKIKINSLLKINGFPCHITGKMGEAFVLRPAVQFCCSNDEALYFKKIIRFNEIRKQREKMGKTISPYEDLSFRSYIKDNLCKKTKADEIEEKEFYDLLQKKNLEIYDMLLTKHKDTIYKKRPNSATIDILVKGKEKFKSLIIENQFEVILEILKLFSATRNVSDLQHIGGSKNAGNARVGNKISSLDNCILIYQSITGIFEKRIDLLKI

SEQ ID NO: 1334 - protein, 631 aa, Treponema denticola
MLWQTLKLVKEISHITQAPPKKIFIEMAKGAELEPARTKTRLKILQDLYNNCKNDADAFSSEIKDLSGKIENEDNLRLRSDKLYLYYTQLGKCMYCGKPIEIGHVFDTSNYDIDHIYPQSKIKDDSISNRVLVCSSCNKNKEDKYPLRSEIQSKQRGFWNFLQRNNFISLEKLNRLTRTTPISDDETAKFIARQLVETRQATKVAAKVLEKMFPETKIVYSKAETVSMFRNKFDIVKCREINDFHHAHDAYLNIVVGNIYNTKFTNNPWNFIKEKRDNPKIADTYNYYKVFDYDVKRNNITAWEKGKTIITVKDMLKRNTPIYTRQAACKKGGLFDQTIMKKGLGQHPLKKEGPFSNISKYGGYNKVSAAYYTLIEYEEKENKIRSLETIPLYLVKDIQKSQEKLKSYLTDLLGKKEIKILVPKIKINSLLKINGFPCHITGKTNDSFLLRPAVQFCCSNDEVLYFKKIIRFNEIRSQREKMGKTISPYEDLSFRSYIKENLCKKTKNDEIGEKEFYDLLQKKNLEIYDMLLTKHKDTIYNKRPNSTTLGMLTKGRYEFINLKPKDQIIVMLEILKLFCTTREAIDLGLIKGKPAAGVATLGKKISNLDNCILIYQSITGIFEKRIDLLKV

SEQ ID NO: 1335 - protein, 631 aa, Treponema denticola
MLWQTLKLVKEISHITQAPPKKIFIEMAKGAELEPARTKTRLKILQDLYSSCKNDADAFSSEIQYLSGKIENEDNLRLRSDKLYLYYTQLGKCMYCGKPIEIGHVFDTSNYDIDHIYPQSKIKDDSISNRVLVCSSCNKNKEDKYPLKSEIQSKQRGFWNFLQRNNFISLEKLNRLTRTTPISDDETAKFIARQLVETRQATKVAAKVLEKMFPETKIVYSKAETVSMFRNKFDIIKCREINDFHHAHDAYLNIVVGNVYNTKFTNNPWNFIKEKRDNPKIADTYNYYKVFDYDVKRNNITAWEKGKTIITVKDMLKRNTPIYTRQAACKKGELFNQTIMKKGLGQHPLKKEGPFSNISKYGGYNKVSAAYYTLIEYEEKVNKIRSLETIPLYLVKDIQKDQDVLKSYLTDLLGKKEIKILVPKIKINSLLKINGFPCHITGKTGDSFVLRPAVQFCCSNDEVLYFKKIIRFNEIRSQREKMGKTISPYEDLSFRSYIKENLCKKTKADEIGEKEFYDLLQKKNLEIYDMLLTKHKDTIYNKRPNSTTLGMLTKGRYEFINLKPKDQIIVMLEILKLFCTTREAIDLGLIKGKPAAGVATLGKKISNLDNCILIYQSITGIFEKRIDLLKV

SEQ ID NO: 1336 - protein, 370 aa, Treponema denticola
MTEIETGTFLPKQISKSNAEIPYQLRKMELEKILSNAEKHFSFLKQKDEKGLSHSEKIIMLLTFKIPYYIGPINDNHKKSFPDRCWVVKKEKSPSGKTTPWNFFDHIDKEKTAEEFITSRTNFCTYLVGESVLPKSSLLYSEYTVLNEINNLQIIIDGKNICDIKLKQKIYEELFKKYKKITQKQISTFIKHEGICNKTDEVIILGIDKECTSSLKSYIELKNIFGKQVDEISTKNMLEDIIRWAAIYDEGEGKTILKTKIKAEYGKYCSDEQIKKILNLKFSGWGRLSRKFLETVTSEMPGFSEPVNIITAMRETQNNLMELLSSEFKFTENIKKINSGFEDVEKQFSYDGLVKPLFLSPSVKKCCGRL

SEQ ID NO: 1337 - protein, 591 aa, Treponema phagedenis
MARGKEAEKGRTSSRYASIKALYENCKQDLADYDAVLEQFKSEEPLRLRSDKLYLYYTQLGRCMYTGRVIDIDRLMSDNSAYDIDHIYPRSKIKDDSLTNRVLVVKDANQDKRDEPLSPQIQDKQKGFWDFLKHNNFISIEKYERLTYRGYFTEEMLSGFIARQLVETRQGTKTAGQILEQLYPDSTVVYCKAANTSEFRQKFNLIKCREINDLHHAHDAYLNIAVGNVYYTKFTSNPRNFMKLKEPYNLRELFDRDVERNNTIAWVKNKTITTIKDMLKRNTPLYTRYAYCKTGGFFDQNIMKKGKGQFPLKENSPLSDISKYGGYNKVSGAYFILVQKKEKDAVVRILETVPLYLLNKPGKESENVREYLSTALGTKDFKILIPKIKINSLFKINGFLVHITGKTNDRFLVRSAVQFFCDDNLTLFFKRIIAFNGLRNLNKDKSMTAYDDNTMRVYVRGNLFKDKNQLFDKNKFNEIVKGKNISVYKDMVKRYETSIYKFRPNTAVIPILKSGEDKFINLPIEEQFKILQEILKLFGAINGTANLTLIGGRPSTGEMKISNNISNLKQCILIHQSPTGVFEQQIDLLKI

SEQ ID NO: 1338 - protein, 1062 aa, Treponema sp.
MIMKLEKWRLGLDLGTNSIGWSVFSLDKDNSVQDLIDMGVRIFSDGRDPKTKEPLAVARRTARSQRKLIYRRKLRRKQVFKFLQEQGLFPKTKEECMTLKSLNPYELRIKALDEKLEPYELGRALFNLAVRRGFKSNRKDGSREEVSEKKSPDEIKTQADMQTHLEKAIKENGCRTITEFLYKNQGENGGIRFAPGRMTYYPTRKMYEEEFNLIRSKQEKYYPQVDWDDIYKAIFYQRPLKPQQRGYCIYENDKERTFKAMPCSQKLRILQDIGNLAYYEGGSKKRVELNDNQDKVLYELLNSKDKVTFDQMRKALCLADSNSFNLEENRDFLIGNPTAVKMRSKNRFGKLWDEIPLEEQDLIIETIITADEDDAVYEVIKKYDLTQEQRDFIVKNTILQSGTSMLCKEVSEKLVKRLEEIADLKYHEAVESLGYKFADQTVEKYDLLPYYGKVLPGSTMEIDLSAPETNPEKHYGKISNPTVHVALNQTRVVVNALIKEYGKPSQIAIELSRDLKNNVEKKAEIARKQNQRAKENIAINDTISALYHTAFPGKSFYPNRNDRMKYRLWSELGLGNKCIYCGKGISGAELFTKEIEIEHILPFSRTLLDAESNLTVAHSSCNAFKAERSPFEAFGTNPSGYSWQEIIQRANQLKNTSKKNKFSPNAMDSFEKDSSFIARQLSDNQYIAKAALRYLKCLVENPSDVWTTNGSMTKLLRDKWEMDSILCRKFTEKEVALLGLKPEQIGNYKKNRFDHRHHAIDAVVIGLTDRSMVQKLATKNSHKGNRIEIPEFPILRSDLIEKVKNIVVSFKPDHGAEGKLSKETLLGKIKLHGKETFVCRENIVSLSEKNLDDIVDEKIKSKVKDYVAKHKGQKIEAVLSDFSKENGIKKVRCVNRVQTPIEITSGKISRYLSPEDYFAAVIWEIPGEKKTFKAQYIRRNEVEKNSKGLNVVKPAVLENGKPHPAAKQVCLLHKDDYLEFSDKGKMYFCRIAGYAATNNKLDIRPVYAVSYCADWINSTNETMLTGYWKPTPTQNWVSVNVLFDKQKARLVTVSPIGRVFRK

SEQ ID NO: 1339 - protein, 281 aa, Treponema vincentii
MKTLGLDIGTNSIGWGIVDETANKIEDCGVYIFPEGVKKEKGNESSKAAERTSFRLARRLKFRRKLRKCETLKVLIKNKMCPLTMEELEKWRKQKIYPVSQDFLNWYRTDELKNWEPYFLRKKCAEQKAGPYEIGRALYHLAQRRGFLSNRKESTKASDGKVSKSIDELSSLMDGRTLGQYFYELKQSGEKVRGKYTSRKEHYEKEFNKICEVQEISPELKDDLYRAIFFQRKLKSQKFLVGKCTFERNKPRAPISHFEFEEFRMLSFINSIKIAKKLRRR

SEQ ID NO: 1340 - protein, 675 aa, uncultured bacterium
MTAENYSNVRFAFDIGTNSIGWAVFQLNDKQEATSILNAGARIFSDGRDPKTFEPLAVRRRNVRSASRMRDRYLRRRKRTLDKLIGYGLLPEDKAERDKILLETNDKPSGSTDKKTDPYSLRARALEEKLPLAYVARALFHIGQRRGFKSNRKADRKSNEKGKIAAGIEELSGLMHQSHAPTLGAYLAKRREEGHVVRLRASSEALTNKAYAFYPERAMLEDEFHKIWQAQAEYYPDVLTKEREEELFHVMFFQRPLKEQKVGLCTLVEGELRLPKSDPLFQQFRLYKEINELAIILPDLSQRKLTMEERDTLITLMRPAKTKTFAALRKALKIPAGGRFNKETENRKQLTGDEVYSVFSKPELFGGDWAKFSIEQQREIIDQLNNEENPDKLEEWLKNKFPKLSDEQRSEIINANLPDGYGRFGITATSKILEQLKKDVISEAEAAHRCGFDHSLANRNWKGLDELPRYQEVLERHIVPGTGDKNDIYDIYKGRLTNPTVHIGLNQVRRLTNRLIKAYGKPWQIVVELARDLPMSSEERKEHNKTLNDNIKAGFERTQKLERLGQKDNANNRLLLKLWEELGKDPDDRKSIYSGTRITEPMLFSGEVEIDHILPFSLTYDDSYANKILCLREENRIKRNRAPADVTEWKDRYDEIIGRSKNCQRTNKNVLGPMQ

SEQ ID NO: 1341 - protein, 1017 aa, uncultured bacterium]
MRVDSLGRCLSDEEWARVIYHLCKHRGFHWISRAEAKQTEGDSKSEGGKVKQGLAGTAKLMDEKGYRSAAEMVLAEFPEAQRNKQGEYRKALSRELLAKELALLFARQRVFGNRHATDTLETAILGNSDKKSGLFWQQKPALAGADLLKMLGTCTFEKNEYRAPKASFTAERHVWLTRLNNLRIVTDGITRQLTEQERQLVLPLPYRQAGDLTYKQLGMALTKAGLLEAGCFKFIGLAYPTEAQKAEGKTKDPESATLVKIPAWQELRQTLNKASLNDEWEKLSGDALCGQPEIFDKIAWILSVYKDDDEVRTELAKLVLPNPEGLTEALLNIRFDKFHALSLKALRAIVPHMEKGLRYDEACVQAGYHHSQLHKIGEGEHKYLPPLYDGRDGDGRMIFAEDADIPRNPVVLRSLNQARKVVNAIIRRYGSPSAVHIEMARDLSRPFDERNKIKKDQDEYQARNQRDREQFIELFGHPPKGLEFEKWRLYREQNGQCAYSQKPLASSGDVAEIFLDGSTEIDHALPYSRSFDDSKNNKVLVLTRENRDKGNRTPYEYLGGAENSERWQRFFSFVESNKAYRLAKRTRLLRKDFGAKESEEFRERNLNDTRYVCRFFKNYVEQHLKLAEGSEAKRCVVVSGQLTNFLRTRWGLLKIRSDSDRHHALDAAVVAACSHSMVQRLSNYSRTRELEQVRDGFVNIETGEIVNPAMHQQLREHFPDPWPYFRHELEARLKIDSPALLREEMARLSSYTEEELAALKPLFVSRAPQRRNGGAAHKDTIYGQPEKLKKNGSVSQKVALASLALKDIDLLADPHRNAKLYGAIRERLEAHGGKGDKAFPATNPLRKPDKEGNPTGPIVRTVTKVIDKLSGIPVRGGIAKNDTMLRVDVFTKAGRFHLVPVYVHHRVTGLPNQAITRGKDENQWAIIDDTFEWRFSLYPNDLVQIRLKDETHLGYYASTDRSTSSISIWAHDRNQSVGKDGLIRSIGVTTAKDIEKFHVDTLGNVYPAPPEKRRGLA

SEQ ID NO: 1342 - protein, 600 aa, uncultured bacterium]
VNAIIKKHGSLSAVHIEMARDLSRPLDERREVKKLQEEFKDRNDKARESFEADHGYRPKGIVFEKWMLYREQHGKCAYSMEGLDIDRVLNDANYAQIDHALPYSRSYDDSKNNKVLVLTRENQNKGNRTAYEYLTSFAGGEDGDRWRNYAAWVNSNKSYRMAKRNRLLRKNYGPDEASGFKDRNLNDTRYICKFFKNYVEEHLQLAPRADGNANKRCVVVNGQLTAFLRARWGLSKVRSESDRHHALDAAVVAACSHGMVKALADYARNKEVAYLREGFPDPETGEIINPEAHARGVHHFPEPWAHFRHELQVRLYSDDLQALREDLQRLGTYSEQDLLGVRTLFVSRAPQRRNDGAVHKETIYAQPEALRKQGGVVQKVPLTSLSLKDLDNLADPHRNAKLYTALRARLEAHGGKADKAFGPDQPFYKPDKNGNPTGPIVRTIKLVIDKLSGIPIRGGVAKNDTMLRVDVFTKAGKFHLVPVYVHHRVTGLPDRAIVAFKDEVEWTQVDDSFKFLFSIHPNDLIRIGLKAKEPMIGYFASCHRGTGAFNVWSHDRNTSVGKSGSVEGIGIKTALSLEKLNIDVLGNVYPARPEQRHGLA

SEQ ID NO: 1343 - protein, 1011 aa, uncultured delta
MSSKAIDSLEQLDLFKPQEYTLGLDLGIKSIGWAILSGERIANAGVYLFETAEELNSTGNKLISKAAERGRKRRIRRMLDRKARRGRHIRYLLEREGLPTDELEEVVVHQSNRTLWDVRAEAVERKLTKQELAAVLFHLVRHRGYFPNTKKLPPDDESDSADEEQGKINRATSRLREELKASDCKTIGQFLAQNRDRQRNREGDYSNLMARKLVFEEALQILAFQRKQGHELSKDFEKTYLDVLMGQRSGRSPKLGNCSLIPSELRAPSSAPSTEWFKFLQNLGNLQISNAYREEWSIDAPRRAQIIDACSQRSTSSYWQIRRDFQIPDEYRFNLVNYERRDPDVDLQEYLQQQERKTLANFRNWKQLEKIIGTGHPIQTLDEAARLITLIKDDEKLSDQLADLLPEASDKAITQLCELDFTTAAKISLEAMYRILPHMNQGMGFFDACQQESLPEIGVPPAGDRVPPFDEMYNPVVNRVLSQSRKLINAVIDEYGMPAKIRVELARDLGKGRELRERIKLDQLDKSKQNDQRAEDFRAEFQQAPRGDQSLRYRLWKEQNCTCPYSGRMIPVNSVLSEDTQIDHILPISQSFDNSLSNKVLCFTEENAQKSNRTPFEYLDAADFQRLEAISGNWPEAKRNKLLHKSFGKVAEEWKSRALNDTRYLTSALADHLRHHLPDSKIQTVNGRITGYLRKQWGLEKDRDKHTHHAVDAIVVACTTPAIVQQVTLYHQDIRRYKKLGEKRPTPWPETFRQDVLDVEEEIFITRQPKKVSGGIQTKDTLRKHRSKPDRQRVALTKVKLADLERLVEKDASNRNLYEHLKQCLEESGDQPTKAFKAPFYMPSGPEAKQRPILSKVTLLREKPEPPKQLTELSGGRRYDSMAQGRLDIYRYKPGGKRKDEYRVVLQRMIDLMRGEENVHVFQKGVPYDQGPEIEQNYTFLFSLYFDDLVEFQRSADSEVIRGYYRTFNIANGQLKISTYLEGRQDFDFFGANRLAHFAKVQVNLLGKVIK

SEQ ID NO: 1344 - protein, 1011 aa, uncultured delta proteobacterium HF0070_07E19; identical to SEQ ID NO: 1343

SEQ ID NO: 1345 - protein, 1120 aa, Veillonella sp.
MGFKANLVNLFTDEDIEVILPEEKEFKSINLHEGIYEDVRDAYEDAWGDRFAIVDQCKVLHDIIVISSIIKPGQSLSEAKIESYNQHKEDLVLLKSVLKEDRKLYDDMFVVDTDKGTNYVKYTKQGVNGNTSATQEEFYKYVRKVVSVLPETEHTRRIVQKLEEGTFLPLQRISKNGVVPYQLHKEELVRILDKATVNFPFLNKVENGLTVADKIISILEFKIPYYVGPLNPTHSIENGGFAWVVRKEAGQVLPWNFEQKVDVQASAVKFIENLTNKCTYLIDQDVLPKYSLLYAEFSLLNELNNIRVNDKPLPADVKQAFIRDHFISLQDSKTATKKVVAKYLVDNNYVSQPPIITGMDQQIATKLTSHRDMTRILGEHFDHAMAEDIIRYITIFGESKDMLRQVLKNYYGDRLTTEQIKKLGKLTYTGWGRLSKKFLSDIWGMKKNDDDAEAGTIIEHMREGQENLMQLLSSSYSFIDVVQEYVTNVLGEKEKTAFEMLEDLSLSPMVKRSVWQTLRILDEIVSIRKELPKKIFVEVARTNKADKKRTQSRKALLEELYKQIKDEDVHVLQQELESKEDSALNSKKLYLYFTQMGRCMYSGRRIDIHELFTDKYDIDHIYPRSLTKDDSWHNIVLVEKQLNAEKTDRFPILSAIQSKQKGFWKLLWDRGFISEKKYDRLVRTTDLTDEELNQFINRQMVSTNQSVKAVTTLLHQLYPETEVVFSKAENVSDFRHDYDFVKVRSINHHHHAKDAYLNIVVGNVYHEKFTKNFLSFAKQKGTRRTYNLTKIFEYEIKLTEESKKVIWDPNIHMDIVKKMMKSNDVRVTQRAVPQKGGLSDETIYKKGIAKRGVYLPLKSSDERVRDVEKYGGRTSITISEYIILNIRDTSDQDRIEIFSLPLYIAGKKDIHKAIEEAYLSTCKKPASVVDIQILYRGLYIGSKVNINGFTYYMGGKTGSNVSIDSAVDVVMDITSSVYIKLLEKVAIKKIENPKTFRIENIKTSYNHKEVTVSKEQNIALYQELLKKLDTPLFSKMKGNKLEEFRTVGFDTFIALSLEEQASVLLEVLNVLTNFKTKRDITKIGMTSSRSTLGINISNTEQFSVITTSITGLYEQEIKIK

SEQ ID NO: 1346 - protein, 983 aa, Verminephrobacter aporrectodeae
MRRRRDRLLKRKARMHDQLMRHGFFPADAAGRKVLERLNPYQLRAKGLHQALTPGEFARALFHINQRRGFQSNRKTDRKDNESGALKQAISELRAQIHDSGCATVGEWFWKERMQQKPEGVHRQGVRARYRETPYTTDEGRQRIDKRYDLYVDRAMIEQEFDALWAVQAALQPGLFTDAACKELRYTLLFQRKLRPVKPGRCTLLPEEERAPLALPSTQRFRILQEVNHLRLLDEALREVPLTLAQRDALVAALESQGKLGFAPMRKLLKLPGTVKFNLEDEKRTELKGNATSAILARKDLFGPAWAGFDAALQDEIVWQLVSEEGEGRLIAWLQQHTGVDEARAEAIADTSLPEGYGSLSRKALERIVPALQREVCSYDKAVQAAGFAHHSDLGFDFEHSGDEVQQVGERIIASTGEVRPLFAFKQLPYYGKALQRHVAFGSGKPEDPEEKRHGKIANPTVHIGLNQVRTVVNALIRRYGRPSEVVVELARDLKQSREQQQETQRKQAENQRRNTRIRERIAETLGISPERVRSSDIQKWILWEELSFDVVDRRCPYSGEQISTTMLLSPKVEIEHILPFSQTLDDSLNNRTVALREANRIKRNRTPWDARADFEARGWSYEGILHRAERMPLRKRYRFAPDGYQRWLGEDKDFLARALNDTRYLSRVAANYLRLVCPKPQGVRVIPGRMTAMLRAKFGLNDVLGLDGEKNRNDHRHHAVDACVIGVTDQGLMQRFARASAQAREDGLTRLVQDMPLPWPSYRDHVERAVRHIWVSHKPDHGFEGAMMEETAYGIRKDGSIKPRRKADGSAGREVVNLIRITESRQPVRHGVDSQGQPLPYKGYVGGSNYCIEITANDQGKWEGAVISTFEAYRIVRASGWGRLRHCSHGQNGRPLMMRLMIGDAVRLALDGSEKTMRVVKISANGQVFLVAPNEANVDARNRDKADPFAYVSKKAGSFQSAKARQVSISPIGELRDPGFKG

SEQ ID NO: 1347 - RNA, 94 nt, artificial  sequence
  Synthetic sequence
guuuucccuuuucaaagaaaucuccugggcaccuaucuucuuaggugcccucccuuguuuaaaccugaccaguuaaccggcugguuagguuuuu

SEQ ID NO: 1348 - RNA, 22 nt, artificial  sequence
  Synthetic sequence
gagauuuaugaaaagggaaaac

SEQ ID NO: 1349 - RNA, 36 nt, artificial  sequence
  Synthetic sequence
uaaucccacagccgccaguuccgcuggcggcauuuu

SEQ ID NO: 1350 - DNA, 10 bp, artificial  sequence
  Synthetic sequence
aagccaaaaa

SEQ ID NO: 1351 - DNA, 15 bp, artificial  sequence
  Synthetic sequence
tcttcattgcgctta

SEQ ID NO: 1352 - RNA, 73 nt, artificial  sequence
  Synthetic sequence
aacagcauagcaaguuaaaauaaggcuaguccguuaucaacuugaaaaguggcaccgagucggugcuuuuuuu

SEQ ID NO: 1353 - DNA, 20 bp, artificial  sequence
  Synthetic sequence
gcagcagaagaagcctttgt

SEQ ID NO: 1354 - DNA, 20 bp, artificial  sequence
  Synthetic sequence
ttcctcctctccctcctctc

SEQ ID NO: 1355 - RNA, 125 nt, artificial  sequence
  Synthetic sequence
  misc_feature (13)..(112): n is a, c, g, or u
guuuuagagcuannnnnnnnnnnnnnnnnnnnnnnnnnnnnnnnnnnnnnnnnnnnnnnnnnnnnnnnnnnnnnnnnnnnnnnnnnnnnnnnnnnnnnnnnnnnnnnnnnnnuagcaaguuaaaa

SEQ ID NO: 1356 - RNA, 123 nt, artificial  sequence
  Synthetic sequence
  misc_feature (12)..(111): n is a, c, g, or u
guuuagagcugnnnnnnnnnnnnnnnnnnnnnnnnnnnnnnnnnnnnnnnnnnnnnnnnnnnnnnnnnnnnnnnnnnnnnnnnnnnnnnnnnnnnnnnnnnnnnnnnnnnncagcaaguuaaa

SEQ ID NO: 1357 - RNA, 124 nt, artificial  sequence
  Synthetic sequence
  misc_feature (13)..(112): n is a, c, g, or u
guuuuagagcugnnnnnnnnnnnnnnnnnnnnnnnnnnnnnnnnnnnnnnnnnnnnnnnnnnnnnnnnnnnnnnnnnnnnnnnnnnnnnnnnnnnnnnnnnnnnnnnnnnnncagcgaguuaaa

SEQ ID NO: 1358 - RNA, 128 nt, artificial  sequence
  Synthetic sequence
  misc_feature (14)..(113): n is a, c, g, or u
guuuuuguacucunnnnnnnnnnnnnnnnnnnnnnnnnnnnnnnnnnnnnnnnnnnnnnnnnnnnnnnnnnnnnnnnnnnnnnnnnnnnnnnnnnnnnnnnnnnnnnnnnnnnagaagcuacaaagau

SEQ ID NO: 1359 - RNA, 122 nt, artificial  sequence
  Synthetic sequence
  misc_feature (12)..(111): n is a, c, g, or u
guuguagcuccnnnnnnnnnnnnnnnnnnnnnnnnnnnnnnnnnnnnnnnnnnnnnnnnnnnnnnnnnnnnnnnnnnnnnnnnnnnnnnnnnnnnnnnnnnnnnnnnnnnnguugcuacaau

SEQ ID NO: 1360 - RNA, 42 nt, artificial  sequence
  Synthetic sequence
guuuuagagcuagaaauagcaaguuaaaauaaggcuaguccg

SEQ ID NO: 1361 - RNA, 55 nt, artificial  sequence
  Synthetic sequence
cucaccuuccuacggucacuauucaccuuacgguacacccgacaguuuuaacucg

SEQ ID NO: 1362 - RNA, 55 nt, artificial  sequence
  Synthetic sequence
uugcacgacgccgaccgaccacuugaaggcuaucacgcccacaacuuacuaaagg

SEQ ID NO: 1363 - RNA, 55 nt, artificial  sequence
  Synthetic sequence
aguguuguuacucaccgucuauaucggaccaccaaguccgccgcguaaaaauaac

SEQ ID NO: 1364 - protein, 34 aa, artificial  sequence
  Synthetic sequence
IPYYVGPLARGNSRFAWMTRKSEETITPWNFEEV

SEQ ID NO: 1365 - protein, 34 aa, artificial  sequence
  Synthetic sequence
IPYYVGPLARGNSDFAWSIRKRNEKITPWNFEDV

SEQ ID NO: 1366 - protein, 34 aa, artificial  sequence
  Synthetic sequence
IPYFVGPLANGQSEFAWLTRKADGEIRPWNIEEK

SEQ ID NO: 1367 - protein, 34 aa, artificial  sequence
  Synthetic sequence
IPYYIGPLAREKSDFAWMTRKTDDSIRPWNFEDL

SEQ ID NO: 1368 - protein, 34 aa, artificial  sequence
  Synthetic sequence
IPYYVGPLARGKSDFAWLSRKSADKITPWNFDEI

SEQ ID NO: 1369 - protein, 36 aa, artificial  sequence
  Synthetic sequence
IPYYVGPLAKKQENSPFAWLIRKSEEKIKPWNLPEI

SEQ ID NO: 1370 - protein, 26 aa, artificial  sequence
  Synthetic sequence
RNSDKLIARKKDWDPKKYGGFDSPTV

SEQ ID NO: 1371 - protein, 39 aa, artificial  sequence
  Synthetic sequence
GLFNANLSSKPKPNSNENLVGAKEYLDPKKYGGYAGISN

SEQ ID NO: 1372 - protein, 26 aa, artificial  sequence
  Synthetic sequence
GNSSKLIPRKTNWDPMKYGGLDSPNM

SEQ ID NO: 1373 - protein, 29 aa, artificial  sequence
  Synthetic sequence
GNSDKLIPRKTKDIYLDPKKYGGFDSPIV

SEQ ID NO: 1374 - protein, 29 aa, artificial  sequence
  Synthetic sequence
GNSDKLIPRKTKKFYWDTKKYGGFDSPIV

SEQ ID NO: 1375 - protein, 26 aa, artificial  sequence
  Synthetic sequence
KDSSKLLPRKNNWDPAKYGGLGSPNV

SEQ ID NO: 1376 - protein, 7 aa, artificial  sequence
  Synthetic sequence
SRVAPDP

SEQ ID NO: 1377 - protein, 7 aa, artificial  sequence
  Synthetic sequence
SGDAVQK

SEQ ID NO: 1378 - protein, 7 aa, artificial  sequence
  Synthetic sequence
ALKDFSH

SEQ ID NO: 1379 - protein, 39 aa, artificial  sequence
  Synthetic sequence
FPDRCWVVKKEKSPSGKTTPWNFFDHIDKEKTAEEFITS

SEQ ID NO: 1380 - protein, 32 aa, artificial  sequence
  Synthetic sequence
AWSIRKRNEKITPWNFEDVIDKESSAEAFINR

SEQ ID NO: 1381 - protein, 32 aa, artificial  sequence
  Synthetic sequence
AWLSRKSADKITPWNFDEIVDKESSAEAFINR

SEQ ID NO: 1382 - protein, 32 aa, artificial  sequence
  Synthetic sequence
AWMTRKTDDSIRPWNFEDLVDKEKSAEAFIHR

SEQ ID NO: 1383 - protein, 32 aa, artificial  sequence
  Synthetic sequence
AWMTRKSEETITPWNFEEVVDKGASAQSFIER

SEQ ID NO: 1384 - protein, 33 aa, artificial  sequence
  Synthetic sequence
FSKRKKTDSDRDETPFGAIAVRGGFVEIGPSIH

SEQ ID NO: 1385 - protein, 26 aa, artificial  sequence
  Synthetic sequence
EPFYKYDKAGNRTQQVKAVRVEQVQK

SEQ ID NO: 1386 - protein, 14 aa, artificial  sequence
  Synthetic sequence
SYGGKEGVLKALEL

SEQ ID NO: 1387 - protein, 37 aa, artificial  sequence
  Synthetic sequence
LGQHPLKKEGPFSNISKYGGYNKVSAAYYTLIEYEEK

SEQ ID NO: 1388 - protein, 37 aa, artificial  sequence
  Synthetic sequence
NSNENLVGAKEYLDPKKYGGYAGISNSFTVLVKGTIE

SEQ ID NO: 1389 - protein, 39 aa, artificial  sequence
  Synthetic sequence
NSDKLIPRKTKKFYWDTKKYGGFDSPIVAYSILVIADIE

SEQ ID NO: 1390 - protein, 39 aa, artificial  sequence
  Synthetic sequence
NSDKLIPRKTKDIYLDPKKYGGFDSPIVAYSVLVVADIK

SEQ ID NO: 1391 - protein, 36 aa, artificial  sequence
  Synthetic sequence
NSDKLIARKKDWDPKKYGGFDSPTVAYSVLVVAKVE

SEQ ID NO: 1392 - DNA, 23 bp, artificial  sequence
  Synthetic sequence
ggcgcataaagatgagacgctgg

SEQ ID NO: 1393 - DNA, 23 bp, artificial  sequence
  Synthetic sequence
ccagcgtctcatctttatgcgcc

SEQ ID NO: 1394 - DNA, 23 bp, artificial  sequence
  Synthetic sequence
gtgataagtggaatgccatgtgg

SEQ ID NO: 1395 - DNA, 23 bp, artificial  sequence
  Synthetic sequence
ccacatggcattccacttatcac

SEQ ID NO: 1396 - DNA, 23 bp, artificial  sequence
  Synthetic sequence
ctggtgaacttccgatagtgcgg

SEQ ID NO: 1397 - DNA, 23 bp, artificial  sequence
  Synthetic sequence
ccgcactatcggaagttcaccag

SEQ ID NO: 1398 - DNA, 23 bp, artificial  sequence
  Synthetic sequence
cagatatagcctggtggttcagg

SEQ ID NO: 1399 - DNA, 23 bp, artificial  sequence
  Synthetic sequence
cctgaaccaccaggctatatctg

SEQ ID NO: 1400 - DNA, 23 bp, artificial  sequence
  Synthetic sequence
ggcaatgccgatggcgatagtgg

SEQ ID NO: 1401 - DNA, 23 bp, artificial  sequence
  Synthetic sequence
ccactatcgccatcggcattgcc

SEQ ID NO: 1402 - DNA, 23 bp, artificial  sequence
  Synthetic sequence
ggtgtgaaagaacaccaacaggg

SEQ ID NO: 1403 - DNA, 23 bp, artificial  sequence
  Synthetic sequence
ccctgttggtgttctttcacacc

SEQ ID NO: 1404 - DNA, 17 bp, artificial  sequence
  Synthetic sequence
taatacgactcactata

SEQ ID NO: 1405 - DNA, 59 bp, artificial  sequence
  Synthetic sequence
caaaacagcatagctctaaaacgcgtctcatctttatgcgtctatagtgagtcgtatta

SEQ ID NO: 1406 - RNA, 42 nt, artificial  sequence
  Synthetic sequence
gacgcauaaagaugagacgcguuuuagagcuaugcuguuuug

SEQ ID NO: 1407 - RNA, 42 nt, artificial  sequence
  Synthetic sequence
gugauaaguggaaugccaugguuuuagagcuaugcuguuuug

SEQ ID NO: 1408 - RNA, 42 nt, artificial  sequence
  Synthetic sequence
cuggugaacuuccgauagugguuuuagagcuaugcuguuuug

SEQ ID NO: 1409 - RNA, 36 nt, artificial  sequence
  Synthetic sequence
cagaaagccggggcguuuuagagcuaugcuguuuug

SEQ ID NO: 1410 - DNA, 59 bp, artificial  sequence
  Synthetic sequence
caaaacagcatagctctaaaacctatcgccatcggcattgcctatagtgagtcgtatta

SEQ ID NO: 1411 - RNA, 42 nt, artificial  sequence
  Synthetic sequence
ggcaaugccgauggcgauagguuuuagagcuaugcuguuuug

SEQ ID NO: 1412 - DNA, 59 bp, artificial  sequence
  Synthetic sequence
caaaacagcatagctctaaaactgttggtgttctttcacacctatagtgagtcgtatta

SEQ ID NO: 1413 - RNA, 42 nt, artificial  sequence
  Synthetic sequence
ggugugaaagaacaccaacaguuuuagagcuaugcuguuuug

SEQ ID NO: 1414 - RNA, 42 nt, artificial  sequence; identical to SEQ ID NO: 280
  Synthetic sequence

SEQ ID NO: 1415 - DNA, 90 bp, artificial  sequence
  Synthetic sequence
aaaaagcaccgactcggtgccactttttcaagttgataacggactagccttattttaacttgctatgctgtcctatagtgagtcgtatta

SEQ ID NO: 1416 - RNA, 73 nt, artificial  sequence
  Synthetic sequence
ggacagcauagcaaguuaaaauaaggcuaguccguuaucaacuugaaaaaguggcaccgagucggugcuuuuu

SEQ ID NO: 1417 - DNA, 55 bp, artificial  sequence
  Synthetic sequence
agcagaaatctctgctgacgcataaagatgagacgctggagtacaaacgtcagct

SEQ ID NO: 1418 - DNA, 55 bp, artificial  sequence
  Synthetic sequence
agctgacgtttgtactccagcgtctcatctttatgcgtcagcagagatttctgct

SEQ ID NO: 1419 - DNA, 55 bp, artificial  sequence
  Synthetic sequence
gagtggaaggatgccagtgataagtggaatgccatgtgggctgtcaaaattgagc

SEQ ID NO: 1420 - DNA, 55 bp, artificial  sequence
  Synthetic sequence
gctcaattttgacagcccacatggcattccacttatcactggcatccttccactc

SEQ ID NO: 1421 - DNA, 55 bp, artificial  sequence
  Synthetic sequence
aacgtgctgcggctggctggtgaacttccgatagtgcgggtgttgaatgatttcc

SEQ ID NO: 1422 - DNA, 55 bp, artificial  sequence
  Synthetic sequence
ggaaatcattcaacacccgcactatcggaagttcaccagccagccgcagcacgtt

SEQ ID NO: 1423 - DNA, 55 bp, artificial  sequence
  Synthetic sequence
tcacaacaatgagtggcagatatagcctggtggttcaggcggcgcatttttattg

SEQ ID NO: 1424 - DNA, 55 bp, artificial  sequence
  Synthetic sequence
caataaaaatgcgccgcctgaaccaccaggctatatctgccactcattgttgtga

SEQ ID NO: 1425 - DNA, 55 bp, artificial  sequence
  Synthetic sequence
gaatgaacgatgcagaggcaatgccgatggcgatagtgggtatcatgtagccgct

SEQ ID NO: 1426 - DNA, 55 bp, artificial  sequence
  Synthetic sequence
agcggctacatgatacccactatcgccatcggcattgcctctgcatcgttcattc

SEQ ID NO: 1427 - DNA, 55 bp, artificial  sequence
  Synthetic sequence
aatcgatggtgtctccggtgtgaaagaacaccaacaggggtgttaccactaccgc

SEQ ID NO: 1428 - DNA, 55 bp, artificial  sequence
  Synthetic sequence
gcggtagtggtaacacccctgttggtgttctttcacaccggagacaccatcgatt

SEQ ID NO: 1429 - DNA, 35 bp, artificial  sequence
  Synthetic sequence
aattgaaagtgataagtggaatgccatgtggaaac

SEQ ID NO: 1430 - DNA, 35 bp, artificial  sequence
  Synthetic sequence
gatcgtttccacatggcattccacttatcactttc

SEQ ID NO: 1431 - DNA, 55 bp, artificial  sequence
  Synthetic sequence
agcagaaatctctgctgacgcataaagatgagacgctcgagtacaaacgtcagct

SEQ ID NO: 1432 - DNA, 55 bp, artificial  sequence
  Synthetic sequence
agctgacgtttgtactcgagcgtctcatctttatgcgtcagcagagatttctgct

SEQ ID NO: 1433 - DNA, 55 bp, artificial  sequence
  Synthetic sequence
agctgcataacgcgaaaaaatatatttatctgcttgatcttcaaatgttgtattg

SEQ ID NO: 1434 - DNA, 55 bp, artificial  sequence
  Synthetic sequence
caatacaacatttgaagatcaagcagataaatatattttttcgcgttatgcagct

SEQ ID NO: 1435 - DNA, 55 bp, artificial  sequence
  Synthetic sequence
agcagaaatctctgctctgcgtatttctactctgcgtggagtacaaacgtcagct

SEQ ID NO: 1436 - DNA, 55 bp, artificial  sequence
  Synthetic sequence
agctgacgtttgtactccacgcagagtagaaatacgcagagcagagatttctgct

SEQ ID NO: 1437 - DNA, 55 bp, artificial  sequence
  Synthetic sequence
agctgcataacgcgggaaaatccatttatctgcttgatcttcggatgttccattg

SEQ ID NO: 1438 - DNA, 55 bp, artificial  sequence
  Synthetic sequence
caatggaacatccgaagatcaagcagataaatggattttcccgcgttatgcagct

SEQ ID NO: 1439 - DNA, 55 bp, artificial  sequence
  Synthetic sequence
ggctgcaccacgcgggaaaatccatttaggtgcttcctcttcggatgttccattg

SEQ ID NO: 1440 - DNA, 55 bp, artificial  sequence
  Synthetic sequence
caatggaacatccgaagaggaagcacctaaatggattttcccgcgtggtgcagcc

SEQ ID NO: 1441 - DNA, 55 bp, artificial  sequence
  Synthetic sequence
ggctggaccacgcgggaaaatccacctaggtggttcctcttcggatgttccatcc

SEQ ID NO: 1442 - DNA, 55 bp, artificial  sequence
  Synthetic sequence
ggatggaacatccgaagaggaaccacctaggtggattttcccgcgtggtccagcc

SEQ ID NO: 1443 - DNA, 55 bp, artificial  sequence
  Synthetic sequence
agcagaaatctctgctctgcgtatttctactcacgctggagtacaaacgtcagct

SEQ ID NO: 1444 - DNA, 55 bp, artificial  sequence
  Synthetic sequence
agctgacgtttgtactccagcgtgagtagaaatacgcagagcagagatttctgct

SEQ ID NO: 1445 - DNA, 55 bp, artificial  sequence
  Synthetic sequence
agcagaaatctctgctctgcgtatttcttgagacgctggagtacaaacgtcagct

SEQ ID NO: 1446 - DNA, 55 bp, artificial  sequence
  Synthetic sequence
agctgacgtttgtactccagcgtctcaagaaatacgcagagcagagatttctgct

SEQ ID NO: 1447 - DNA, 55 bp, artificial  sequence
  Synthetic sequence
agcagaaatctctgctctgcgtataagatgagacgctggagtacaaacgtcagct

SEQ ID NO: 1448 - DNA, 55 bp, artificial  sequence
  Synthetic sequence
agctgacgtttgtactccagcgtctcatcttatacgcagagcagagatttctgct

SEQ ID NO: 1449 - DNA, 55 bp, artificial  sequence
  Synthetic sequence
agcagaaatctctgctctgccataaagatgagacgctggagtacaaacgtcagct

SEQ ID NO: 1450 - DNA, 55 bp, artificial  sequence
  Synthetic sequence
agctgacgtttgtactccagcgtctcatctttatggcagagcagagatttctgct

SEQ ID NO: 1451 - DNA, 55 bp, artificial  sequence
  Synthetic sequence
agcagaaatctctgctgacggtataagatgagacgctggagtacaaacgtcagct

SEQ ID NO: 1452 - DNA, 55 bp, artificial  sequence
  Synthetic sequence
agctgacgtttgtactccagcgtctcatcttataccgtcagcagagatttctgct

SEQ ID NO: 1453 - DNA, 55 bp, artificial  sequence
  Synthetic sequence
agcagaaatctctgctgacgcatattcttgagacgctggagtacaaacgtcagct

SEQ ID NO: 1454 - DNA, 55 bp, artificial  sequence
  Synthetic sequence
agctgacgtttgtactccagcgtctcaagaatatgcgtcagcagagatttctgct

SEQ ID NO: 1455 - DNA, 55 bp, artificial  sequence
  Synthetic sequence
agcagaaatctctgctgacgcataaagaactcacgctggagtacaaacgtcagct

SEQ ID NO: 1456 - DNA, 55 bp, artificial  sequence
  Synthetic sequence
agctgacgtttgtactccagcgtgagttctttatgcgtcagcagagatttctgct

SEQ ID NO: 1457 - DNA, 55 bp, artificial  sequence
  Synthetic sequence
agcagaaatctctgctgacgcataaagatgagtgcgtggagtacaaacgtcagct

SEQ ID NO: 1458 - DNA, 55 bp, artificial  sequence
  Synthetic sequence
agctgacgtttgtactccacgcactcatctttatgcgtcagcagagatttctgct

SEQ ID NO: 1459 - DNA, 55 bp, artificial  sequence
  Synthetic sequence
agcagaaatctctgctgacgcataaagatgagaccgtggagtacaaacgtcagct

SEQ ID NO: 1460 - DNA, 55 bp, artificial  sequence
  Synthetic sequence
agctgacgtttgtactccacggtctcatctttatgcgtcagcagagatttctgct

SEQ ID NO: 1461 - DNA, 55 bp, artificial  sequence; identical to SEQ ID NO: 1417
  Synthetic sequence

SEQ ID NO: 1462 - DNA, 55 bp, artificial  sequence; identical to SEQ ID NO: 1418
  Synthetic sequence

SEQ ID NO: 1463 - DNA, 55 bp, artificial  sequence; identical to SEQ ID NO: 1419
  Synthetic sequence

SEQ ID NO: 1464 - DNA, 55 bp, artificial  sequence; identical to SEQ ID NO: 1420
  Synthetic sequence

SEQ ID NO: 1465 - DNA, 55 bp, artificial  sequence; identical to SEQ ID NO: 1420
  Synthetic sequence

SEQ ID NO: 1466 - DNA, 19 bp, artificial  sequence
  Synthetic sequence
tgggctgtcaaaattgagc

SEQ ID NO: 1467 - DNA, 72 bp, artificial  sequence
  Synthetic sequence
ttcgaaagagtggaaggatgccagtgataagtggaatgccatgtgggctgtcaaaattgagcagaccaaaga

SEQ ID NO: 1468 - DNA, 72 bp, artificial  sequence
  Synthetic sequence
tctttggtctgctcaattttgacagcccacatggcattccacttatcactggcatccttccactctttcgaa

SEQ ID NO: 1469 - DNA, 26 bp, artificial  sequence
  Synthetic sequence
gctgtcaaaattgagcagaccaaaga

SEQ ID NO: 1470 - DNA, 29 bp, artificial  sequence
  Synthetic sequence
tgggctgtcaaaattgagcagaccaaaga

SEQ ID NO: 1471 - DNA, 11 bp, artificial  sequence
  Synthetic sequence
tgggctgtcaa

SEQ ID NO: 1472 - RNA, 37 nt, artificial  sequence
  Synthetic sequence
uugacagcccacauggcauuccacuuaucacuggcau

SEQ ID NO: 1473 - DNA, 27 bp, artificial  sequence
  Synthetic sequence
atgaccctaggggctcccccctgcaaa

SEQ ID NO: 1474 - DNA, 25 bp, artificial  sequence
  Synthetic sequence
agaccctaggggctccccccgcaaa

SEQ ID NO: 1475 - DNA, 26 bp, artificial  sequence
  Synthetic sequence
atgacccaggggctcccccctgcaaa

SEQ ID NO: 1476 - DNA, 25 bp, artificial  sequence
  Synthetic sequence
atgacccaggggccccccctgcaaa

SEQ ID NO: 1477 - DNA, 26 bp, artificial  sequence
  Synthetic sequence
atgaccctaggggctccccccgcaaa

SEQ ID NO: 1478 - DNA, 26 bp, artificial  sequence
  Synthetic sequence
atgaccctaggggccccccctgcaaa

SEQ ID NO: 1479 - DNA, 141 bp, artificial  sequence
  Synthetic sequence
taatacgactcactataggtgataagtggaatgccatggttttagagctatgctgttttggaaacaaaacagcatagcaagttaaaataaggctagtccgttatcaacttgaaaaagtggcaccgagtcggtgcttttttt

SEQ ID NO: 1480 - RNA, 124 nt, artificial  sequence
  Synthetic sequence
ggugauaaguggaaugccaugguuuuagagcuaugcuguuuuggaaacaaaacagcauagcaaguuaaaauaaggcuaguccguuaucaacuugaaaaaguggcaccgagucggugcuuuuuuu

SEQ ID NO: 1481 - DNA, 55 bp, artificial  sequence; identical to SEQ ID NO: 1420
  Synthetic sequence

SEQ ID NO: 1482 - DNA, 73 bp, artificial  sequence
  Synthetic sequence
gagtggaaggatgccagtgataagtggaatgccatgtgggctgtcaaaattgagcctatagtgagtcgtatta

SEQ ID NO: 1483 - RNA, 56 nt, artificial  sequence
  Synthetic sequence
ggcucaauuuugacagcccacauggcauuccacuuaucacuggcauccuuccacuc

SEQ ID NO: 1484 - DNA, 73 bp, artificial  sequence
  Synthetic sequence
gctcaattttgacagcccacatggcattccacttatcactggcatccttccactcctatagtgagtcgtatta

SEQ ID NO: 1485 - DNA, 56 bp, artificial  sequence
  Synthetic sequence
ggagtggaaggatgccagtgataagtggaatgccatgtgggctgtcaaaattgagc

SEQ ID NO: 1486 - DNA, 18 bp, artificial  sequence
  Synthetic sequence
gggctgtcaaaattgagc

SEQ ID NO: 1487 - DNA, 19 bp, artificial  sequence
  Synthetic sequence
accgctgtcaaaattgagc

SEQ ID NO: 1488 - RNA, 18 nt, artificial  sequence
  Synthetic sequence
gggcugucaaaauugagc

SEQ ID NO: 1489 - DNA, 10 bp, artificial  sequence
  Synthetic sequence
tgggctgtca

SEQ ID NO: 1490 - DNA, 15 bp, artificial  sequence
  Synthetic sequence
tgggctgtcaaaatt

SEQ ID NO: 1491 - DNA, 72 bp, artificial  sequence
  Synthetic sequence
aacgtgctgcggctggctggtgaacttccgatagtgcgggtgttgaatgatttcctatagtgagtcgtatta

SEQ ID NO: 1492 - RNA, 55 nt, artificial  sequence
  Synthetic sequence
ggaaaucauucaacacccgcacuaucggaaguucaccagccagccgcagcacguu

SEQ ID NO: 1493 - DNA, 74 bp, artificial  sequence
  Synthetic sequence
tcacaacaatgagtggcagatatagcctggtggttcaggcggcgcatttttattgcctatagtgagtcgtatta

SEQ ID NO: 1494 - RNA, 57 nt, artificial  sequence
  Synthetic sequence
ggcaauaaaaaugcgccgccugaaccaccaggcuauaucugccacucauuguuguga

SEQ ID NO: 1495 - DNA, 19 bp, artificial  sequence
  Synthetic sequence
cgggtgttgaatgatttcc

SEQ ID NO: 1496 - DNA, 19 bp, artificial  sequence
  Synthetic sequence
aggcggcgcatttttattg

SEQ ID NO: 1497 - DNA, 21 bp, artificial  sequence
  Synthetic sequence
tgtgggctgtcaaaattgagc

SEQ ID NO: 1498 - DNA, 21 bp, artificial  sequence
  Synthetic sequence
tgcgggtgttgaatgatttcc

SEQ ID NO: 1499 - DNA, 24 bp, artificial  sequence
  Synthetic sequence
ccatgtgggctgtcaaaattgagc

SEQ ID NO: 1500 - DNA, 24 bp, artificial  sequence
  Synthetic sequence
tagtgcgggtgttgaatgatttcc

SEQ ID NO: 1501 - DNA, 27 bp, artificial  sequence
  Synthetic sequence
atgccatgtgggctgtcaaaattgagc

SEQ ID NO: 1502 - DNA, 27 bp, artificial  sequence
  Synthetic sequence
cgatagtgcgggtgttgaatgatttcc

SEQ ID NO: 1503 - DNA, 30 bp, artificial  sequence
  Synthetic sequence
ggaatgccatgtgggctgtcaaaattgagc

SEQ ID NO: 1504 - DNA, 30 bp, artificial  sequence
  Synthetic sequence
ttccgatagtgcgggtgttgaatgatttcc

SEQ ID NO: 1505 - DNA, 33 bp, artificial  sequence
  Synthetic sequence
agtggaatgccatgtgggctgtcaaaattgagc

SEQ ID NO: 1506 - DNA, 33 bp, artificial  sequence
  Synthetic sequence
aacttccgatagtgcgggtgttgaatgatttcc

SEQ ID NO: 1507 - DNA, 36 bp, artificial  sequence
  Synthetic sequence
ataagtggaatgccatgtgggctgtcaaaattgagc

SEQ ID NO: 1508 - DNA, 39 bp, artificial  sequence
  Synthetic sequence
gtgataagtggaatgccatgtgggctgtcaaaattgagc

SEQ ID NO: 1509 - DNA, 39 bp, artificial  sequence
  Synthetic sequence
ctggtgaacttccgatagtgcgggtgttgaatgatttcc

SEQ ID NO: 1510 - DNA, 55 bp, artificial  sequence
  Synthetic sequence
gagtggaaggatgccagtgataagtggaatgccatgaccgctgtcaaaattgagc

SEQ ID NO: 1511 - DNA, 55 bp, artificial  sequence
  Synthetic sequence
gctcaattttgacagcggtcatggcattccacttatcactggcatccttccactc

SEQ ID NO: 1512 - DNA, 73 bp, artificial  sequence
  Synthetic sequence
gagtggaaggatgccagtgataagtggaatgccatgaccgctgtcaaaattgagcctatagtgagtcgtatta

SEQ ID NO: 1513 - RNA, 55 nt, artificial  sequence
  Synthetic sequence
ggcucaauuuugacagcggcauggcauuccacuuaucacuggcauccuuccacuc

SEQ ID NO: 1514 - DNA, 18 bp, artificial  sequence
  Synthetic sequence
gggctgtcaaaattgagc

SEQ ID NO: 1515 - DNA, 19 bp, artificial  sequence
  Synthetic sequence
tgggctgtcaaaattgagc

SEQ ID NO: 1516 - DNA, 18 bp, artificial  sequence
  Synthetic sequence
gggctgtcaaaattgagc

SEQ ID NO: 1517 - DNA, 19 bp, artificial  sequence
  Synthetic sequence
tgggctgtcaaaattgagc

SEQ ID NO: 1518 - DNA, 17 bp, artificial  sequence
  Synthetic sequence
gggcgtcaaaattgagc

SEQ ID NO: 1519 - DNA, 130 bp, artificial  sequence
  Synthetic sequence
taatacgactcactataggggcagagatgatgaccctgtttaagagctatgctggaaacagcatagcaagtttaaataaggctagtccgttatcaacttgaaaaagtggcaccgagtcggtgcttttttt

SEQ ID NO: 1520 - RNA, 113 nt, artificial  sequence
  Synthetic sequence
ggggcagagaugaugacccuguuuaagagcuaugcuggaaacagcauagcaaguuuaaauaaggcuaguccguuaucaacuugaaaaaguggcaccgagucggugcuuuuuuu

SEQ ID NO: 1521 - DNA, 132 bp, artificial  sequence
  Synthetic sequence
taatacgactcactataggccaaagttgtcatggatgacgtttaagagctatgctggaaacagcatagcaagtttaaataaggctagtccgttatcaacttgaaaaagtggcaccgagtcggtgcttttttt

SEQ ID NO: 1522 - RNA, 115 nt, artificial  sequence
  Synthetic sequence
ggccaaaguugucauggaugacguuuaagagcuaugcuggaaacagcauagcaaguuuaaauaaggcuaguccguuaucaacuugaaaaaguggcaccgagucggugcuuuuuuu

SEQ ID NO: 1523 - RNA, 115 nt, artificial  sequence
  Synthetic sequence
ggaugucaucauauuuggcaggguuuaagagcuaugcuggaaacagcauagcaaguuuaaauaaggcuaguccguuaucaacuugaaaaaguggcaccgagucggugcuuuuuuu

SEQ ID NO: 1524 - DNA, 132 bp, artificial  sequence
  Synthetic sequence
taatacgactcactataggatgtcatcatatttggcagggtttaagagctatgctggaaacagcatagcaagtttaaataaggctagtccgttatcaacttgaaaaagtggcaccgagtcggtgcttttttt

SEQ ID NO: 1525 - DNA, 115 bp, artificial  sequence
  Synthetic sequence
ggatgtcatcatatttggcagggtttaagagctatgctggaaacagcatagcaagtttaaataaggctagtccgttatcaacttgaaaaagtggcaccgagtcggtgcttttttt

SEQ ID NO: 1526 - DNA, 27 bp, artificial  sequence
  Synthetic sequence
atgacccttggggctcccccctgcaaa

SEQ ID NO: 1527 - DNA, 27 bp, artificial  sequence
  Synthetic sequence
tggatgaccggggccaggggtgctaag

SEQ ID NO: 1528 - DNA, 27 bp, artificial  sequence
  Synthetic sequence
ttggcaggtggttctagacggcaggtc

SEQ ID NO: 1529 - DNA, 27 bp, artificial  sequence
  Synthetic sequence
ccccagcgtggaaggtggaggagtggg

SEQ ID NO: 1530 - DNA, 26 bp, artificial  sequence
  Synthetic sequence
atgaccctaggggctccccccgcaaa

SEQ ID NO: 1531 - DNA, 21 bp, artificial  sequence
  Synthetic sequence
ctcactgttctctccctccgc

SEQ ID NO: 1532 - DNA, 20 bp, artificial  sequence
  Synthetic sequence
aggggtctacatggcaactg

SEQ ID NO: 1533 - DNA, 20 bp, artificial  sequence
  Synthetic sequence
agaaaatctggcaccacacc

SEQ ID NO: 1534 - DNA, 20 bp, artificial  sequence
  Synthetic sequence
ggagtacttgcgctcaggag

SEQ ID NO: 1535 - RNA, 86 nt, Streptococcus mutans
aaacaacacagcaaguuaaauaaggcagugauuuuuaauccaguccguacacaacuugaaaaagugcgcaccgauucggugcuuuu

SEQ ID NO: 1536 - RNA, 25 nt, Streptococcus mutans
agcaaguuaaaauaaggcuaguccg

SEQ ID NO: 1537 - RNA, 71 nt, Streptococcus thermophilus
aaacaacacagcgaguuaaauaaggcuuaguccguacucaacuugaaaagguggcaccgauucgguguuuu

SEQ ID NO: 1538 - RNA, 26 nt, Streptococcus thermophilus
cagcgaguuaaauaaggcuuaguccg

SEQ ID NO: 1539 - RNA, 82 nt, Streptococcus thermophilus
aaaucuugcagaagcuacaaagauaaggcuucaugccgaaaucaacacccugucauuuuauggcaggguguuuucguuauuu

SEQ ID NO: 1540 - RNA, 29 nt, Streptococcus thermophilus
agaagcuacaaagauaaggcuucaugccg

SEQ ID NO: 1541 - RNA, 95 nt, Neisseria meningitidis
aaaugagaaccguugcuacaauaaggccgucugaaaagaugugccgcaacgcucugccccuuaaagcuucugcuuuaaggggcaucguuuauuuc

SEQ ID NO: 1542 - RNA, 35 nt, Neisseria meningitidis
guugcuacaauaaggccgucugaaaagaugugccg

SEQ ID NO: 1543 - RNA, 89 nt, Pasteurella multocida
aaaugagagaguugcuacaauaaggcuucugaaaagaaugaccguaacgcucugccccuugugauucuuaauugcaaggggcaucguuu

SEQ ID NO: 1544 - RNA, 37 nt, Pasteurella multocida
agaguugcuacaauaaggcuucugaaaagaaugaccg

SEQ ID NO: 1545 - protein, 1367 aa, Streptococcus pyogenes
MDKKYSIGLDIGTNSVGWAVITDDYKVPSKKLKVLGNTDRHGIKKNLIGALLFDSGETAEATRLKRTARRRYTRRKNRICYLQEIFSNEMAKVDDSFFHRLEESFLVEEDKKHERHPIFGNIVDEVAYHEKYPTIYHLRKKLADSTDKVDLRLIYLALAHMIKFRGHFLIEGDLNPDNSDVDKLFIQLVQTYNQLFEENPINASRVDAKAILSARLSKSRRLENLIAQLPGEKKNGLFGNLIALSLGLTPNFKSNFDLAEDAKLQLSKDTYDDDLDNLLAQIGDQYADLFLAAKNLSDAILLSDILRVNSEITKAPLSASMIKRYDEHHQDLTLLKALVRQQLPEKYKEIFFDQSKNGYAGYIDGGASQEEFYKFIKPILEKMDGTEELLAKLNREDLLRKQRTFDNGSIPYQIHLGELHAILRRQEDFYPFLKDNREKIEKILTFRIPYYVGPLARGNSRFAWMTRKSEETITPWNFEEVVDKGASAQSFIERMTNFDKNLPNEKVLPKHSLLYEYFTVYNELTKVKYVTEGMRKPAFLSGEQKKAIVDLLFKTNRKVTVKQLKEDYFKKIECFDSVEISGVEDRFNTSLGTYHDLLKIIKDKDFLDNEENEDILEDIVLTLTLFEDKEMIEERLKKYANLFDDKVMKQLKRRHYTGWGRLSRKLINGIRDKQSGKTILDFLKSDGFANRNFMQLINDDSLTFKEAIQKAQVSGQGHSLHEQIANLAGSPAIKKGILQTVKIVDELVKVMGHKPENIVIEMARENQTTQKGQKNSRERMKRIEEGIKELGSQILKEHPVENTQLQNEKLYLYYLQNGRDMYVDQELDINRLSDYDVDHIVPQSFLKDDSIDNKVLTRSDKNRGKSDNVPSEEVVKKMKNYWRQLLNAKLITQRKFDNLTKAERGGLSELDKAGFIKRQLVETRQITKHVAQILDSRMNTKYDENDKLIREVKVITLKSKLVSDFRKDFQFYKVREINNYHHAHDAYLNAVVGTALIKKYPKLESEFVYGDYKVYDVRKMIAKSEQEIGKATAKYFFYSNIMNFFKTEITLANGEIRKRPLIETNGETGEIVWDKGRDFATVRKVLSMPQVNIVKKTEVQTGGFSKESILPKRNSDKLIARKKDWDPKKYGGFDSPTVAYSVLVVAKVEKGKSKKLKSVKELLGITIMERSSFEKNPIDFLEAKGYKEVRKDLIIKLPKYSLFELENGRKRMLASAGELQKGNELALPSKYVNFLYLASHYEKLKGSPEDNEQKQLFVEQHKHYLDEIIEQISEFSKRVILADANLDKVLSAYNKHRDKPIREQAKNIIHLFTLTNLGAPAAFKYFDTTIERNRYKSIKEVLDATLIHQSITGLYEIRIDLSQLGGD

SEQ ID NO: 1546 - protein, 17 aa, artificial  sequence
  Synthetic sequence
MAPKKKRKVGIHGVPAA

SEQ ID NO: 1547 - protein, 16 aa, artificial  sequence
  Synthetic sequence
KRPAATKKAGQAKKKK

SEQ ID NO: 1548 - protein, 5 aa, artificial  sequence
  Synthetic sequence
GSGGS

SEQ ID NO: 1549 - protein, 4 aa, artificial  sequence
  Synthetic sequence
GGGS

SEQ ID NO: 1550 - protein, 4 aa, artificial  sequence
  Synthetic sequence
GGSG

SEQ ID NO: 1551 - protein, 5 aa, artificial  sequence
  Synthetic sequence
GGSGG

SEQ ID NO: 1552 - protein, 5 aa, artificial  sequence
  Synthetic sequence
GSGSG

SEQ ID NO: 1553 - protein, 5 aa, artificial  sequence
  Synthetic sequence
GSGGG

SEQ ID NO: 1554 - protein, 5 aa, artificial  sequence
  Synthetic sequence
GGGSG

SEQ ID NO: 1555 - protein, 5 aa, artificial  sequence
  Synthetic sequence
GSSSG

SEQ ID NO: 1556 - protein, 47 aa, artificial  sequence
  Synthetic sequence
NDLDAYEREAEKLEKKNEVLRNRLAALENELATLRQEVASMKQELQS

SEQ ID NO: 1557 - protein, 42 aa, artificial  sequence
  Synthetic sequence
NEKEELKSKKAELRNRIEQLKQKREQLKQKIANLRKEIEAYK

SEQ ID NO: 1558 - protein, 41 aa, artificial  sequence
  Synthetic sequence
SIAATLENDLARLENENARLEKDIANLERDLAKLEREEAYF

SEQ ID NO: 1559 - protein, 107 aa, artificial  sequence
  Synthetic sequence
GVQVETISPGDGRTFPKRGQTCVVHYTGMLEDGKKFDSSRDRNKPFKFMLGKQEVIRGWEEGVAQMSVGQRAKLTISPDYAYGATGHPGIIPPHATLVFDVELLKLE

SEQ ID NO: 1560 - protein, 292 aa, artificial  sequence
  Synthetic sequence
LEESVALRIITEGASILRQEKNLLDIDAPVTVCGDIHGQFFDLMKLFEVGGSPANTRYLFLGDYVDRGYFSIECVLYLWALKILYPKTLFLLRGNHECRHLTEYFTFKQECKIKYSERVYDACMDAFDCLPLAALMNQQFLCVHGGLSPEINTLDDIRKLDRFKEPPAYGPMCDILWSDPLEDFGNEKTQEHFTHNTVRGCSYFYSYPAVCEFLQHNNLLSILRAHEAQDAGYRMYRKSQTTGFPSLITIFSAPNYLDVYNNKAAVLKYENNVMNIRQFNCSPHPYWLPNFM

SEQ ID NO: 1561 - protein, 165 aa, artificial  sequence
  Synthetic sequence
MVNPTVFFDIAVDGEPLGRVSFELFADKVPKTAENFRALSTGEKGFGYKGSCFHRIIPGFMCQGGDFTRHNGTGGKSIYGEKFEDENFILKHTGPGILSMANAGPNTNGSQFFICTAKTEWLDGKHVVFGKVKEGMNIVEAMERFGSRNGKTSKKITIADCGQLE

SEQ ID NO: 1562 - protein, 94 aa, artificial  sequence
  Synthetic sequence
VAILWHEMWHEGLEEASRLYFGERNVKGMFEVLEPLHAMMERGPQTLKETSFNQAYGRDLMEAQEWCRKYMKSGNVKDLTQAWDLYYHVFRRIS

SEQ ID NO: 1563 - protein, 804 aa, artificial  sequence
  Synthetic sequence
MSNSYDSSSIKVLKGLDAVRKRPGMYIGDTDDGTGLHHMVFEVVDNAIDEALAGHCKEIIVTIHADNSVSVQDDGRGIPTGIHPEEGVSAAEVIMTVLHAGGKFDDNSYKVSGGLHGVGVSVVNALSQKLELVIQREGKIHRQIYEHGVPQAPLAVTGETEKTGTMVRFWPSLETFTNVTEFEYEILAKRLRELSFLNSGVSIRLRDKRDGKEDHFHYEGGIKAFVEYLNKNKTPIHPNIFYFSTEKDGIGVEVALQWNDGFQENIYCFTNNIPQRDGGTHLAGFRAAMTRTLNAYMDKEGYSKKAKVSATGDDAREGLIAVVSVKVPDPKFSSQTKDKLVSSEVKSAVEQQMNELLAEYLLENPTDAKIVVGKIIDAARAREAARRAREMTRRKGALDLAGLPGKLADCQERDPALSELYLVEGDSAGGSAKQGRNRKNQAILPLKGKILNVEKARFDKMLSSQEVATLITALGCGIGRDEYNPDKLRYHSIIIMTDADVDGSHIRTLLLTFFYRQMPEIVERGHVYIAQPPLYKVKKGKQEQYIKDDEAMDQYQISIALDGATLHTNASAPALAGEALEKLVSEYNATQKMINRMERRYPKAMLKELIYQPTLTEADLSDEQTVTRWVNALVSELNDKEQHGSQWKFDVHTNAEQNLFEPIVRVRTHGVDTDYPLDHEFITGGEYRRICTLGEKLRGLLEEDAFIERGERRQPVASFEQALDWLVKESRRGLSIQRYKGLGEMNPEQLWETTMDPESRRMLRVTVKDAIAADQLFTTLMGDAVEPRRAFIEENALKAANIDI

SEQ ID NO: 1564 - protein, 187 aa, artificial  sequence
  Synthetic sequence
MVGSLNCIVAVSQNMGIGKNGDLPWPPLRNEFRYFQRMTTTSSVEGKQNLVIMGKKTWFSIPEKNRPLKGRINLVLSRELKEPPQGAHFLSRSLDDALKLTEQPELANKVDMVWIVGGSSVYKEAMNHPGHLKLFVTRIMQDFESDTFFPEIDLEKYKLLPEYPGVLSDVQEEKGIKYKFEVYEKND

SEQ ID NO: 1565 - protein, 111 aa, artificial  sequence
  Synthetic sequence
MASRGVQVETISPGDGRTFPKRGQTCVVHYTGMLEDGKKVDSSRDRNKPFKFMLGKQEVIRGWEEGVAQMSVGQRAKLTISPDYAYGATGHPGIIPPHATLVFDVELLKLE

SEQ ID NO: 1566 - protein, 183 aa, artificial  sequence
  Synthetic sequence
MNGDETKKVESEYIKKHHRHELVESQCSSTLVKHIKAPLHLVWSIVRRFDEPQKYKPFISRCVVQGKKLEVGSVREVDLKSGLPATKSTEVLEILDDNEHILGIRIVGGDHRLKNYSSTISLHSETIDGKTGTLAIESFVVDVPEGNTKEETCFFVEALIQCNLNSLADVTERLQAESMEKKI

SEQ ID NO: 1567 - protein, 161 aa, artificial  sequence
  Synthetic sequence
METSQKYHTCGSTLVQTIDAPLSLVWSILRRFDNPQAYKQFVKTCNLSSGDGGEGSVREVTVVSGLPAEFSRERLDELDDESHVMMISIIGGDHRLVNYRSKTMAFVAADTEEKTVVVESYVVDVPEGNSEEETTSFADTIVGFNLKSLAKLSERVAHLKL

SEQ ID NO: 1568 - protein, 159 aa, artificial  sequence
  Synthetic sequence
MKTSQEQHVCGSTVVQTINAPLPLVWSILRRFDNPKTFKHFVKTCKLRSGDGGEGSVREVTVVSDLPASFSLERLDELDDESHVMVISIIGGDHRLVNYQSKTTVFVAAEEEKTVVVESYVVDVPEGNTEEETTLFADTIVGCNLRSLAKLSEKMMELT

SEQ ID NO: 1569 - protein, 164 aa, artificial  sequence
  Synthetic sequence
MESSKQKRCRSSVVETIEAPLPLVWSILRSFDKPQAYQRFVKSCTMRSGGGGGKGGEGKGSVRDVTLVSGFPADFSTERLEELDDESHVMVVSIIGGNHRLVNYKSKTKVVASPEDMAKKTVVVESYVVDVPEGTSEEDTIFFVDNIIRYNLTSLAKLTKKMMK

SEQ ID NO: 1570 - protein, 221 aa, artificial  sequence
  Synthetic sequence
MANSESSSSPVNEEENSQRISTLHHQTMPSDLTQDEFTQLSQSIAEFHTYQLGNGRCSSLLAQRIHAPPETVWSVVRRFDRPQIYKHFIKSCNVSEDFEMRVGCTRDVNVISGLPANTSRERLDLLDDDRRVTGFSITGGEHRLRNYKSVTTVHRFEKEEEEERIWTVVLESYVVDVPEGNSEEDTRLFADTVIRLNLQKLASITEAMNRNNNNNNSSQVR

SEQ ID NO: 1571 - protein, 190 aa, artificial  sequence
  Synthetic sequence
MSSSPAVKGLTDEEQKTLEPVIKTYHQFEPDPTTCTSLITQRIHAPASVVWPLIRRFDNPERYKHFVKRCRLISGDGDVGSVREVTVISGLPASTSTERLEFVDDDHRVLSFRVVGGEHRLKNYKSVTSVNEFLNQDSGKVYTVVLESYTVDIPEGNTEEDTKMFVDTVVKLNLQKLGVAATSAPMHDDE

SEQ ID NO: 1572 - protein, 209 aa, artificial  sequence
  Synthetic sequence
MNLAPIHDPSSSSTTTTSSSTPYGLTKDEFSTLDSIIRTHHTFPRSPNTCTSLIAHRVDAPAHAIWRFVRDFANPNKYKHFIKSCTIRVNGNGIKEIKVGTIREVSVVSGLPASTSVEILEVLDEEKRILSFRVLGGEHRLNNYRSVTSVNEFVVLEKDKKKRVYSVVLESYIVDIPQGNTEEDTRMFVDTVVKSNLQNLAVISTASPT

SEQ ID NO: 1573 - protein, 207 aa, artificial  sequence
  Synthetic sequence
MLAVHRPSSAVSDGDSVQIPMMIASFQKRFPSLSRDSTAARFHTHEVGPNQCCSAVIQEISAPISTVWSVVRRFDNPQAYKHFLKSCSVIGGDGDNVGSLRQVHVVSGLPAASSTERLDILDDERHVISFSVVGGDHRLSNYRSVTTLHPSPISGTVVVESYVVDVPPGNTKEETCDFVDVIVRCNLQSLAKIAENTAAESKKKMSL

SEQ ID NO: 1574 - protein, 203 aa, artificial  sequence
  Synthetic sequence
MRSPVQLQHGSDATNGFHTLQPHDQTDGPIKRVCLTRGMHVPEHVAMHHTHDVGPDQCCSSVVQMIHAPPESVWALVRRFDNPKVYKNFIRQCRIVQGDGLHVGDLREVMVVSGLPAVSSTERLEILDEERHVISFSVVGGDHRLKNYRSVTTLHASDDEGTVVVESYIVDVPPGNTEEETLSFVDTIVRCNLQSLARSTNRQ

SEQ ID NO: 1575 - protein, 215 aa, artificial  sequence
  Synthetic sequence
MPTSIQFQRSSTAAEAANATVRNYPHHHQKQVQKVSLTRGMADVPEHVELSHTHVVGPSQCFSVVVQDVEAPVSTVWSILSRFEHPQAYKHFVKSCHVVIGDGREVGSVREVRVVSGLPAAFSLERLEIMDDDRHVISFSVVGGDHRLMNYKSVTTVHESEEDSDGKKRTRVVESYVVDVPAGNDKEETCSFADTIVRCNLQSLAKLAENTSKFS

SEQ ID NO: 1576 - protein, 211 aa, artificial  sequence
  Synthetic sequence
MEMIGGDDTDTEMYGALVTAQSLRLRHLHHCRENQCTSVLVKYIQAPVHLVWSLVRRFDQPQKYKPFISRCTVNGDPEIGCLREVNVKSGLPATTSTERLEQLDDEEHILGINIIGGDHRLKNYSSILTVHPEMIDGRSGTMVMESFVVDVPQGNTKDDTCYFVESLIKCNLKSLACVSERLAAQDITNSIATFCNASNGYREKNHTETNL

SEQ ID NO: 1577 - protein, 188 aa, artificial  sequence
  Synthetic sequence
MEANGIENLTNPNQEREFIRRHHKHELVDNQCSSTLVKHINAPVHIVWSLVRRFDQPQKYKPFISRCVVKGNMEIGTVREVDVKSGLPATRSTERLELLDDNEHILSIRIVGGDHRLKNYSSIISLHPETIEGRIGTLVIESFVVDVPEGNTKDETCYFVEALIKCNLKSLADISERLAVQDTTESRV

SEQ ID NO: 1578 - protein, 187 aa, artificial  sequence
  Synthetic sequence
MMDGVEGGTAMYGGLETVQYVRTHHQHLCRENQCTSALVKHIKAPLHLVWSLVRRFDQPQKYKPFVSRCTVIGDPEIGSLREVNVKSGLPATTSTERLELLDDEEHILGIKIIGGDHRLKNYSSILTVHPEIIEGRAGTMVIESFVVDVPQGNTKDETCYFVEALIRCNLKSLADVSERLASQDITQ

SEQ ID NO: 1579 - protein, 191 aa, artificial  sequence
  Synthetic sequence
MPSELTPEERSELKNSIAEFHTYQLDPGSCSSLHAQRIHAPPELVWSIVRRFDKPQTYKHFIKSCSVEQNFEMRVGCTRDVIVISGLPANTSTERLDILDDERRVTGFSIIGGEHRLTNYKSVTTVHRFEKENRIWTVVLESYVVDMPEGNSEDDTRMFADTVVKLNLQKLATVAEAMARNSGDGSGSQVT

SEQ ID NO: 1580 - protein, 434 aa, artificial  sequence
  Synthetic sequence
MEEVSPAIAGPFRPFSETQMDFTGIRLGKGYCNNQYSNQDSENGDLMVSLPETSSCSVSGSHGSESRKVLISRINSPNLNMKESAAADIVVVDISAGDEINGSDITSEKKMISRTESRSLFEFKSVPLYGFTSICGRRPEMEDAVSTIPRFLQSSSGSMLDGRFDPQSAAHFFGVYDGHGGSQVANYCRERMHLALAEEIAKEKPMLCDGDTWLEKWKKALFNSFLRVDSEIESVAPETVGSTSVVAVVFPSHIFVANCGDSRAVLCRGKTALPLSVDHKPDREDEAARIEAAGGKVIQWNGARVFGVLAMSRSIGDRYLKPSIIPDPEVTAVKRVKEDDCLILASDGVWDVMTDEEACEMARKRILLWHKKNAVAGDASLLADERRKEGKDPAAMSAAEYLSKLAIQRGSKDNISVVVVDLKPRRKLKSKPLN

SEQ ID NO: 1581 - protein, 423 aa, artificial  sequence
  Synthetic sequence
MDEVSPAVAVPFRPFTDPHAGLRGYCNGESRVTLPESSCSGDGAMKDSSFEINTRQDSLTSSSSAMAGVDISAGDEINGSDEFDPRSMNQSEKKVLSRTESRSLFEFKCVPLYGVTSICGRRPEMEDSVSTIPRFLQVSSSSLLDGRVTNGFNPHLSAHFFGVYDGHGGSQVANYCRERMHLALTEEIVKEKPEFCDGDTWQEKWKKALFNSFMRVDSEIETVAHAPETVGSTSVVAVVFPTHIFVANCGDSRAVLCRGKTPLALSVDHKPDRDDEAARIEAAGGKVIRWNGARVFGVLAMSRSIGDRYLKPSVIPDPEVTSVRRVKEDDCLILASDGLWDVMTNEEVCDLARKRILLWHKKNAMAGEALLPAEKRGEGKDPAAMSAAEYLSKMALQKGSKDNISVVVVDLKGIRKFKSKSLN

SEQ ID NO: 1582 - protein, 612 aa, artificial  sequence
  Synthetic sequence
MKMDKKTIVWFRRDLRIEDNPALAAAAHEGSVFPVFIWCPEEEGQFYPGRASRWWMKQSLAHLSQSLKALGSDLTLIKTHNTISAILDCIRVTGATKVVFNHLYDPVSLVRDHTVKEKLVERGISVQSYNGDLLYEPWEIYCEKGKPFTSFNSYWKKCLDMSIESVMLPPPWRLMPITAAAEAIWACSIEELGLENEAEKPSNALLTRAWSPGWSNADKLLNEFIEKQLIDYAKNSKKVVGNSTSLLSPYLHFGEISVRHVFQCARMKQIIWARDKNSEGEESADLFLRGIGLREYSRYICFNFPFTHEQSLLSHLRFFPWDADVDKFKAWRQGRTGYPLVDAGMRELWATGWMHNRIRVIVSSFAVKFLLLPWKWGMKYFWDTLLDADLECDILGWQYISGSIPDGHELDRLDNPALQGAKYDPEGEYIRQWLPELARLPTEWIHHPWDAPLTVLKASGVELGTNYAKPIVDIDTARELLAKAISRTREAQIMIGAAPDEIVADSFEALGANTIKEPGLCPSVSSNDQQVPSAVRYNGSKRVKPEEEEERDMKKSRGFDERELFSTAESSSSSSVFFVSQSCSLASEGKNLEGIQDSSDQITTSLGKNGCK

SEQ ID NO: 1583 - protein, 335 aa, artificial  sequence
  Synthetic sequence
MNGAIGGDLLLNFPDMSVLERQRAHLKYLNPTFDSPLAGFFADSSMITGGEMDSYLSTAGLNLPMMYGETTVEGDSRLSISPETTLGTGNFKKRKFDTETKDCNEKKKKMTMNRDDLVEEGEEEKSKITEQNNGSTKSIKKMKHKAKKEENNFSNDSSKVTKELEKTDYIHVRARRGQATDSHSIAERVRREKISERMKFLQDLVPGCDKITGKAGMLDEIINYVQSLQRQIEFLSMKLAIVNPRPDFDMDDIFAKEVASTPMTVVPSPEMVLSGYSHEMVHSGYSSEMVNSGYLHVNPMQQVNTSSDPLSCFNNGEAPSMWDSHVQNLYGNLGV

SEQ ID NO: 1584 - protein, 533 aa, artificial  sequence
  Synthetic sequence
MKRDHHHHHHQDKKTMMMNEEDDGNGMDELLAVLGYKVRSSEMADVAQKLEQLEVMMSNVQEDDLSQLATETVHYNPAELYTWLDSMLTDLNPPSSNAEYDLKAIPGDAILNQFAIDSASSSNQGGGGDTYTTNKRLKCSNGVVETTTATAESTRHVVLVDSQENGVRLVHALLACAEAVQKENLTVAEALVKQIGFLAVSQIGAMRKVATYFAEALARRIYRLSPSQSPIDHSLSDTLQMHFYETCPYLKFAHFTANQAILEAFQGKKRVHVIDFSMSQGLQWPALMQALALRPGGPPVFRLTGIGPPAPDNFDYLHEVGCKLAHLAEAIHVEFEYRGFVANTLADLDASMLELRPSEIESVAVNSVFELHKLLGRPGAIDKVLGVVNQIKPEIFTVVEQESNHNSPIFLDRFTESLHYYSTLFDSLEGVPSGQDKVMSEVYLGKQICNVVACDGPDRVERHETLSQWRNRFGSAGFAAAHIGSNAFKQASMLLALFNGGEGYRVEESDGCLMLGWHTRPLIATSAWKLSTN

SEQ ID NO: 1585 - protein, 345 aa, artificial  sequence
  Synthetic sequence
MAASDEVNLIESRTVVPLNTWVLISNFKVAYNILRRPDGTFNRHLAEYLDRKVTANANPVDGVFSFDVLIDRRINLLSRVYRPAYADQEQPPSILDLEKPVDGDIVPVILFFHGGSFAHSSANSAIYDTLCRRLVGLCKCVVVSVNYRRAPENPYPCAYDDGWIALNWVNSRSWLKSKKDSKVHIFLAGDSSGGNIAHNVALRAGESGIDVLGNILLNPMFGGNERTESEKSLDGKYFVTVRDRDWYWKAFLPEGEDREHPACNPFSPRGKSLEGVSFPKSLVVVAGLDLIRDWQLAYAEGLKKAGQEVKLMHLEKATVGFYLLPNNNHFHNVMDEISAFVNAEC

SEQ ID NO: 1586 - protein, 358 aa, artificial  sequence
  Synthetic sequence
MAGGNEVNLNECKRIVPLNTWVLISNFKLAYKVLRRPDGSFNRDLAEFLDRKVPANSFPLDGVFSFDHVDSTTNLLTRIYQPASLLHQTRHGTLELTKPLSTTEIVPVLIFFHGGSFTHSSANSAIYDTFCRRLVTICGVVVVSVDYRRSPEHRYPCAYDDGWNALNWVKSRVWLQSGKDSNVYVYLAGDSSGGNIAHNVAVRATNEGVKVLGNILLHPMFGGQERTQSEKTLDGKYFVTIQDRDWYWRAYLPEGEDRDHPACNPFGPRGQSLKGVNFPKSLVVVAGLDLVQDWQLAYVDGLKKTGLEVNLLYLKQATIGFYFLPNNDHFHCLMEELNKFVHSIEDSQSKSSPVLLTP

SEQ ID NO: 1587 - protein, 344 aa, artificial  sequence
  Synthetic sequence
MAGSEEVNLIESKTVVPLNTWVLISNFKLAYNLLRRPDGTFNRHLAEFLDRKVPANANPVNGVFSFDVIIDRQTNLLSRVYRPADAGTSPSITDLQNPVDGEIVPVIVFFHGGSFAHSSANSAIYDTLCRRLVGLCGAVVVSVNYRRAPENRYPCAYDDGWAVLKWVNSSSWLRSKKDSKVRIFLAGDSSGGNIVHNVAVRAVESRIDVLGNILLNPMFGGTERTESEKRLDGKYFVTVRDRDWYWRAFLPEGEDREHPACSPFGPRSKSLEGLSFPKSLVVVAGLDLIQDWQLKYAEGLKKAGQEVKLLYLEQATIGFYLLPNNNHFHTVMDEIAAFVNAECQ

SEQ ID NO: 1588 - DNA, 18 bp, Artificial Sequence
  Synthetic nucleic acid sequence
  misc_feature (1)..(1): The G at this position is 2' O methylated
  misc_feature (2)..(2): The G at this position is 2' O methylated
  misc_feature (3)..(3): The G at this position is 2' O methylated
  misc_feature (4)..(4): The C at this position is 2' O methylated
  misc_feature (5)..(5): The N at this position is a U that is 2' O methylated
  misc_feature (6)..(6): The G at this position is 2' O methylated
  misc_feature (7)..(7): The N at this position is a U that is 2' O methylated
  misc_feature (8)..(8): The C at this position is 2' O methylated
  misc_feature (9)..(9): The A at this position is 2' O methylated
  misc_feature (10)..(10): The A at this position is 2' O methylated
gggcngncaaaattgagc

SEQ ID NO: 1589 - DNA, 18 bp, Artificial Sequence
  Synthetic nucleic acid sequence
  misc_feature (1)..(10): The linkages between the nucleotides at these positions are phosphorothioate linkages
gggctgtcaaaattgagc

SEQ ID NO: 1590 - DNA, 19 bp, Artificial Sequence
  Synthetic nucleic acid sequence
  misc_feature (1)..(2): The linkage between the nucleotides at these positions is a phosphorothioate linkage
  misc_feature (18)..(19): The linkage between the nucleotides at these positions is a phosphorothioate linkage
tgggctgtcaaaattgagc

SEQ ID NO: 1591 - DNA, 18 bp, Artificial Sequence
  Synthetic nucleic acid sequence
  misc_feature (1)..(3): The G nucleotides at these positions are 2' Fluoro modified
  misc_feature (4)..(4): The C nucleotide at this position is 2' Fluoro modified
  misc_feature (4)..(4): The C nucleotide at this position is 2' Fluoro modified
  misc_feature (5)..(5): The T nucleotide at this position is 2' Fluoro modified
  misc_feature (6)..(6): The G nucleotide at this position is 2' Fluoro modified
  misc_feature (7)..(7): The T nucleotide at this position is 2' Fluoro modified
  misc_feature (8)..(8): The C nucleotide at this position is 2' Fluoro modified
  misc_feature (9)..(10): The A nucleotides at these positions are 2' Fluoro modified
gggctgtcaaaattgagc

SEQ ID NO: 1592 - DNA, 18 bp, Artificial Sequence
  Synthetic nucleic acid sequence
  misc_feature (1)..(3): The G nucleotides at these positions are locked nucleic acids (LNA)
  misc_feature (7)..(7): The T nucleotide at this position is a locked nucleic acid (LNA)
  misc_feature (8)..(8): The C nucleotide at this position is a locked nucleic acid (LNA)
  misc_feature (9)..(9): The A nucleotide at this position is a locked nucleic acid (LNA)
gggctgtcaaaattgagc

SEQ ID NO: 1593 - DNA, 19 bp, Artificial Sequence
  Synthetic nucleic acid sequence
  misc_feature (1)..(1): The N at this position is a U nucleotide that is 2' Fluoro modified
  misc_feature (19)..(19): The C nucleotide at this position is 2' Fluoro modified
ngggctgtcaaaattgagc

SEQ ID NO: 1594 - DNA, 19 bp, Artificial Sequence
  Synthetic nucleic acid sequence
  misc_feature (1)..(1): The T nucleotide at this position is a locked nucleic acid (LNA)
  misc_feature (19)..(19): The C nucleotide at this position is a locked nucleic acid (LNA)
tgggctgtcaaaattgagc

SEQ ID NO: 1595 - protein, 845 aa, Artificial Sequence
  Synthetic sequence
MDYKDHDGDYKDHDIDYKDDDDKMAPKKKRKVGIHGVPAASIAATLENDLARLENENARLEKDIANLERDLAKLEREEAYFGGSGGSGGSASGQGDSLHEHIANLAGSPAIKKGILQTVKVVDELVKVMGRHKPENIVIEMARENQTTQKGQKNSRERMKRIEEGIKELGSQILKEHPVENTQLQNEKLYLYYLQNGRDMYVDQELDINRLSDYDVDHIVPQSFLKDDSIDNKVLTRSDKNRGKSDNVPSEEVVKKMKNYWRQLLNAKLITQRKFDNLTKAERGGLSELDKAGFIKRQLVETRQITKHVAQILDSRMNTKYDENDKLIREVKVITLKSKLVSDFRKDFQFYKVREINNYHHAHDAYLNAVVGTALIKKYPKLESEFVYGDYKVYDVRKMIAKSEQEIGKATAKYFFYSNIMNFFKTEITLANGEIRKRPLIETNGETGEIVWDKGRDFATVRKVLSMPQVNIVKKTEVQTGGFSKESILPKRNSDKLIARKKDWDPKKYGGFDSPTVAYSVLVVAKVEKGKSKKLKSVKELLGITIMERSSFEKNPIDFLEAKGYKEVKKDLIIKLPKYSLFELENGRKRMLASAGELQKGNELALPSKYVNFLYLASHYEKLKGSPEDNEQKQLFVEQHKHYLDEIIEQISEFSKRVILADANLDKVLSAYNKHRDKPIREQAENIIHLFTLTNLGAPAAFKYFDTTIDRKRYTSTKEVLDATLIHQSITGLYETRIDLSQLGGDGSGGSGGSGGSGGSGGSGGSGGSGGVDDKKYSIGLDIGTNSVGWAVITDEYKVPSKKFKVLGNTDRHSIKKNLIGALLFDSGEKRPAATKKAGQAKKKK

SEQ ID NO: 1596 - protein, 837 aa, Artificial Sequence
  Synthetic sequence
MDYKDHDGDYKDHDIDYKDDDDKMAPKKKRKVGIHGVPAASIAATLENDLARLENENARLEKDIANLERDLAKLEREEAYFGGSGGSGGSASGQGDNVPSEEVVKKMKNYWRQLLNAKLITQRKFDNLTKAERGGLSELDKAGFIKRQLVETRQITKHVAQILDSRMNTKYDENDKLIREVKVITLKSKLVSDFRKDFQFYKVREINNYHHAHDAYLNAVVGTALIKKYPKLESEFVYGDYKVYDVRKMIAKSEQEIGKATAKYFFYSNIMNFFKTEITLANGEIRKRPLIETNGETGEIVWDKGRDFATVRKVLSMPQVNIVKKTEVQTGGFSKESILPKRNSDKLIARKKDWDPKKYGGFDSPTVAYSVLVVAKVEKGKSKKLKSVKELLGITIMERSSFEKNPIDFLEAKGYKEVKKDLIIKLPKYSLFELENGRKRMLASAGELQKGNELALPSKYVNFLYLASHYEKLKGSPEDNEQKQLFVEQHKHYLDEIIEQISEFSKRVILADANLDKVLSAYNKHRDKPIREQAENIIHLFTLTNLGAPAAFKYFDTTIDRKRYTSTKEVLDATLIHQSITGLYETRIDLSQLGGDGSGGSGGSGGSGGSGGSGGSGGSGGVDDKKYSIGLDIGTNSVGWAVITDEYKVPSKKFKVLGNTDRHSIKKNLIGALLFDSGGSSGSPAIKKGILQTVKVVDELVKVMGRHKPENIVIEMARENQTTQKGQKNSRERMKRIEEGIKELGSQILKEHPVENTQLQNEKLYLYYLQNGRDMYVDQELDINRLSDYDVDHIVPQSFLKDDSIDNKVLTRSDKNRGKSEKRPAATKKAGQAKKKK

What is claimed is:

1. A method of labeling a single stranded target nucleic acid, the method comprising contacting a single stranded target nucleic acid having a first target site comprising a first sequence of nucleotides and a second target site comprising a second sequence of nucleotides, wherein the second target site is positioned on the target nucleic acid 5′ of the first target site, with:
(a) a quenched PAMmer, wherein the quenched PAMmer is a single stranded oligonucleotide comprising:
(a.i) a protospacer adjacent motif (PAM) sequence,
(a.ii) a detectable label,
(a.iii) a quencher moiety that quenches the detectable label, and
(a.iv) at least one of:
a specificity segment, positioned 5′ of the PAM sequence, that hybridizes with nucleotides of the first target site, and
an orientation segment, positioned 3′ of the PAM sequence, that hybridizes with nucleotides of the second target site;
(b) a Cas9 protein; and
(c) a Cas9 guide RNA that forms a complex with the Cas9 protein and hybridizes with the first target site,
whereby the Cas9 protein cleaves the quenched PAMmer at a cleavage site positioned between the detectable label and the quencher moiety to produce: (i) a first cleavage product that is hybridized with the target nucleic acid and comprises the detectable label; and (ii) a second cleavage product that is not hybridized with the target nucleic acid and comprises the quencher moiety.

2. The method according to claim 1, wherein the detectable label is positioned 3′ of the cleavage site, the quencher moiety is positioned 5′ of the cleavage site, and the quenched PAMmer comprises an orientation segment.

3. The method according to claim 1, wherein the detectable label is positioned 5′ of the cleavage site, the quencher moiety is positioned 3′ of the cleavage site, and the quenched PAMmer comprises a specificity segment.

4. The method according to any of claims 1 to 3, wherein the detectable label and the quencher moiety are both positioned 5′ of the PAM sequence.

5. The method according to claim 1 or claim 2, wherein the detectable label is positioned 3′ of the PAM sequence and the quencher moiety is positioned 5′ of the PAM sequence.

6. The method according to claim 1 or claim 3, wherein the detectable label is positioned 5′ of the PAM sequence and the quencher moiety is positioned 3′ of the PAM sequence.

7. The method according to any of claims 1 to 6, wherein the quenched PAMmer comprises an orientation segment and a specificity segment.

8. The method according to claim 2, wherein the quenched PAMmer comprises a 5′ extension arm, positioned 5′ of the PAM sequence, wherein the 5′ extension arm comprises: (a) a nucleotide sequence that does not hybridize with the target nucleic acid, and (b) the quencher moiety.

9. The method according to claim 3, wherein the quenched PAMmer comprises a 3′ extension arm, positioned 3′ of the PAM sequence, wherein the 3′ extension arm comprises: (a) a nucleotide sequence that does not hybridize with the target nucleic acid, and (b) the quencher moiety.

10. The method according to any one of claims 1 to 9, wherein the PAM sequence is GG.

11. The method according to any one of claims 1 to 9, wherein the PAM sequence is 5′-NGG-3′, wherein N can be any nucleotide.

12. The method according to any one of claims 1 to 11, wherein the PAM sequence does not hybridize with the target nucleic acid when the quenched PAMmer is hybridized with the target nucleic acid.

13. The method according to any one of claims 1 to 11, wherein the target nucleic acid does not comprise a sequence that is: (i) complementary to the PAM sequence, and (ii) 5′ of and adjacent to the first target site; whereby the PAM sequence does not hybridize with the target nucleic acid when the quenched PAMmer is hybridized with the target nucleic acid.

14. The method according to any one of claims 1 to 13, wherein 10 or fewer nucleotides are present in the target nucleic acid between the first and second target sites.

15. The method according to any one of claims 1 to 14, wherein 2 or 3 nucleotides are present in the target nucleic acid between the first and second target sites.

16. The method according to any one of claims 1 to 15, wherein the detectable label is a fluorescent label.

17. The method according to claim 16, wherein the fluorescent label is selected from: an Alexa Fluor® dye, an ATTO dye, a DyLight dye, a cyanine dye, a FluoProbes dye, a Sulfo Cy dye, a Seta dye, an IRIS Dye, a SeTau dye, an SRfluor dye, a Square dye, fluorescein (FITC), tetramethylrhodamine (TRITC), Texas Red, Oregon Green, Pacific Blue, Pacific Green, Pacific Orange, and a Biotium fluorescent dye (e.g., CF 640R, e.g., iCF640RN).

18. The method according to claim 16 or claim 17, wherein the quencher moiety is a dark quencher.

19. The method according to claim 16 or claim 17, wherein the quencher moiety is selected from: a dark quencher, a Black Hole Quencher® (BHQ®), a Qxl quencher, an ATTO quencher, dimethylaminoazobenzenesulfonic acid (Dabsyl), Iowa Black RQ, Iowa Black FQ, IRDye QC-1, a QSY dye, AbsoluteQuencher, Eclipse, and a metal cluster.

20. The method according to any one of claims 1 to 19, wherein the PAMmer comprises two or more detectable labels.

21. The method according to any one of claims 1 to 20, wherein the PAMmer comprises two or more quencher moieties.

22. The method according to any one of claims 1 to 21, wherein the single stranded target nucleic acid is a single stranded RNA (ssRNA).

23. The method according to claim 22, wherein the target ssRNA is selected from: mRNA, rRNA, tRNA, non-coding RNA (ncRNA), long non-coding RNA (lncRNA), and microRNA (miRNA).

24. The method according to claim 23, wherein the target ssRNA is mRNA and the method results in a detectably labeled mRNA.

25. The method according any one of claims 1 to 21, wherein the single stranded target nucleic acid is single stranded DNA (ssDNA).

26. The method according to any one of claims 1 to 25, wherein the single stranded target nucleic acid is from a virus.

27. The method of any one of claims 1 to 26, wherein said contacting is outside of a cell in vitro.

28. The method according to any one of claims 1 to 26, wherein said contacting is in a target cell in vitro or ex vivo.

29. The method according to any one of claims 1 to 26, wherein said contacting is in a target cell in vivo.

30. The method according to claim 28 or claim 29, wherein the target cell is a living cell.

31. The method according to any one of claims 1 to 30, wherein the Cas9 guide RNA is a DNA/RNA hybrid nucleic acid comprising deoxyribonucleotides that hybridize with the target nucleic acid.

32. The method according to any one of claims 1 to 31, wherein the Cas9 guide RNA is a Cas9 dual guide RNA.

33. The method according to any one of claims 1 to 31, wherein the Cas9 guide RNA is a Cas9 single guide RNA.

34. The method according to any one of claims 1 to 33, wherein the Cas9 protein is a variant Cas9 protein that cleaves the quenched PAMmer but does not cleave the target nucleic acid.

35. The method according to claim 34, wherein the variant Cas9 protein has a mutation in the HNH domain relative to a wild type Cas9 protein.

36. The method according to any one of claims 1 to 35, wherein the Cas9 protein cleaves the quenched PAMmer and modifies the target nucleic acid.

37. The method according to any one of claims 1 to 33, wherein the Cas9 protein cleaves the quenched PAMmer and cleaves the target nucleic acid.

38. A method of detecting a single stranded target nucleic acid in a sample, wherein the target nucleic acid comprises a first target site comprising a first sequence of nucleotides and a second target site comprising a second sequence of nucleotides, wherein the second target site is positioned on the target nucleic acid 5′ of the first target site, the method comprising:
(I) contacting the sample with:
(a) a quenched PAMmer, wherein the quenched PAMmer is a single stranded oligonucleotide comprising:
(a.i) a protospacer adjacent motif (PAM) sequence,
(a.ii) a detectable label,
(a.iii) a quencher moiety that quenches the detectable label, and
(a.iv) at least one of:
a specificity segment, positioned 5′ of the PAM sequence, that hybridizes with nucleotides of the first target site, and
an orientation segment, positioned 3′ of the PAM sequence, that hybridizes with nucleotides of the second target site;
(b) a Cas9 protein; and
(c) a Cas9 guide RNA that forms a complex with the Cas9 protein and hybridizes with the first target site,
whereby the Cas9 protein cleaves the quenched PAMmer at a cleavage site positioned between the detectable label and the quencher moiety to produce: (i) a first cleavage product that is hybridized with the target nucleic acid and comprises the detectable label; and (ii) a second cleavage product that is not hybridized with the target nucleic acid and comprises the quencher moiety; and
(II) measuring a signal from the detectable label.

39. The method according to claim 38, wherein said detecting is quantitative.

40. The method according to claim 38, wherein said detecting is qualitative.

41. The method according to any one of claims 38 to 40, wherein the sample comprises single stranded nucleic acids that are not in a cell.

42. The method according to any one of claims 38 to 41, wherein the sample comprises a cell and the target nucleic acid is in the cell.

43. A composition comprising:
(i) a quenched PAMmer, wherein the quenched PAMmer is a single stranded oligonucleotide comprising:
(a) a protospacer adjacent motif (PAM) sequence,
(b) a detectable label,
(c) a quencher moiety that quenches the detectable label, and
(d) at least one of:
a specificity segment, positioned 5′ of the PAM sequence, that hybridizes with nucleotides of a first target site of a target nucleic acid, and
an orientation segment, positioned 3′ of the PAM sequence, that hybridizes with nucleotides of a second target site of the target nucleic acid; and
(ii) a Cas9 guide RNA comprising a nucleotide sequence that hybridizes with the first target site of the target nucleic acid.

44. A kit comprising:
(i) a quenched PAMmer, wherein the quenched PAMmer is a single stranded oligonucleotide comprising:
(a) a protospacer adjacent motif (PAM) sequence,
(b) a detectable label,
(c) a quencher moiety that quenches the detectable label, and
(d) at least one of:
a specificity segment, positioned 5′ of the PAM sequence, that hybridizes with nucleotides of a first target site of a target nucleic acid, and
an orientation segment, positioned 3′ of the PAM sequence, that hybridizes with nucleotides of a second target site of the target nucleic acid; and
(ii) a Cas9 guide RNA comprising a nucleotide sequence that hybridizes with the first target site of the target nucleic acid;
wherein (i) and (ii) are present in the same or separate containers.

45. A library comprising:
two or more labeling nucleic acid pairs, wherein each labeling nucleic acid pair comprises:
(i) a quenched PAMmer, wherein the quenched PAMmer is a single stranded oligonucleotide comprising:
(a) a protospacer adjacent motif (PAM) sequence,
(b) a detectable label,
(c) a quencher moiety that quenches the detectable label, and
(d) at least one of:
a specificity segment, positioned 5′ of the PAM sequence, that hybridizes with nucleotides of a first target site of a target nucleic acid, and
an orientation segment, positioned 3′ of the PAM sequence, that hybridizes with nucleotides of a second target site of the target nucleic acid; and
(ii) a Cas9 guide RNA comprising a nucleotide sequence that hybridizes with the first target site of the target nucleic acid.
